United States Patent Application Publication US 2026/0345682 A1 - sequence listing, part 2

SEQ ID NO: 30833 - RNA, 22 nt, synthetic construct
  source 1..22: mol_type = other RNA
ttaccaaaagctcatgtgcagt

SEQ ID NO: 30834 - RNA, 22 nt, synthetic construct
  source 1..22: mol_type = other RNA
ttaccatgacaagaacattgta

SEQ ID NO: 30835 - RNA, 22 nt, synthetic construct
  source 1..22: mol_type = other RNA
ttaccccgaagttacgtctttc

SEQ ID NO: 30836 - RNA, 22 nt, synthetic construct
  source 1..22: mol_type = other RNA
ttaccctctattttcacttccc

SEQ ID NO: 30837 - RNA, 22 nt, synthetic construct
  source 1..22: mol_type = other RNA
ttacctacacatctgcaagatg

SEQ ID NO: 30838 - RNA, 22 nt, synthetic construct
  source 1..22: mol_type = other RNA
ttacctttttccatgttttgtt

SEQ ID NO: 30839 - RNA, 22 nt, synthetic construct
  source 1..22: mol_type = other RNA
ttacgtctttctccattagcct

SEQ ID NO: 30840 - RNA, 22 nt, synthetic construct
  source 1..22: mol_type = other RNA
ttacgttttagatgggattccg

SEQ ID NO: 30841 - RNA, 22 nt, synthetic construct
  source 1..22: mol_type = other RNA
ttactctcaaatcacagaagca

SEQ ID NO: 30842 - RNA, 22 nt, synthetic construct
  source 1..22: mol_type = other RNA
ttactggcattatcagcatcat

SEQ ID NO: 30843 - RNA, 22 nt, synthetic construct
  source 1..22: mol_type = other RNA
ttacttaaaaacaaggcagtgc

SEQ ID NO: 30844 - RNA, 22 nt, synthetic construct
  source 1..22: mol_type = other RNA
ttacttcaagcaaagctcagtg

SEQ ID NO: 30845 - RNA, 22 nt, synthetic construct
  source 1..22: mol_type = other RNA
ttacttctggatgagctctctc

SEQ ID NO: 30846 - RNA, 22 nt, synthetic construct
  source 1..22: mol_type = other RNA
ttacttgcttctgtgatttgag

SEQ ID NO: 30847 - RNA, 22 nt, synthetic construct
  source 1..22: mol_type = other RNA
ttactttggttggggtagtggt

SEQ ID NO: 30848 - RNA, 22 nt, synthetic construct
  source 1..22: mol_type = other RNA
ttagaagaacaccaccactacc

SEQ ID NO: 30849 - RNA, 22 nt, synthetic construct
  source 1..22: mol_type = other RNA
ttagagcagcaaacaacttctt

SEQ ID NO: 30850 - RNA, 22 nt, synthetic construct
  source 1..22: mol_type = other RNA
ttagagcagcatgcttttgagt

SEQ ID NO: 30851 - RNA, 22 nt, synthetic construct
  source 1..22: mol_type = other RNA
ttagaggtctgtgcggaattga

SEQ ID NO: 30852 - RNA, 22 nt, synthetic construct
  source 1..22: mol_type = other RNA
ttagatgggattccgcttggtg

SEQ ID NO: 30853 - RNA, 22 nt, synthetic construct
  source 1..22: mol_type = other RNA
ttagcactgccttgtttttaag

SEQ ID NO: 30854 - RNA, 22 nt, synthetic construct
  source 1..22: mol_type = other RNA
ttagcacttttcccctcctgct

SEQ ID NO: 30855 - RNA, 22 nt, synthetic construct
  source 1..22: mol_type = other RNA
ttagcattgcagctagtttact

SEQ ID NO: 30856 - RNA, 22 nt, synthetic construct
  source 1..22: mol_type = other RNA
ttagccttttggtcttgtttca

SEQ ID NO: 30857 - RNA, 22 nt, synthetic construct
  source 1..22: mol_type = other RNA
ttaggactctgggaaggtggtg

SEQ ID NO: 30858 - RNA, 22 nt, synthetic construct
  source 1..22: mol_type = other RNA
ttaggcattagcactgccttgt

SEQ ID NO: 30859 - RNA, 22 nt, synthetic construct
  source 1..22: mol_type = other RNA
ttagtagcctgactgttaatgg

SEQ ID NO: 30860 - RNA, 22 nt, synthetic construct
  source 1..22: mol_type = other RNA
ttagtctggccaaagaatgatc

SEQ ID NO: 30861 - RNA, 22 nt, synthetic construct
  source 1..22: mol_type = other RNA
ttagtctgttgccctcaacatg

SEQ ID NO: 30862 - RNA, 22 nt, synthetic construct
  source 1..22: mol_type = other RNA
ttagtgaacactgagctttgct

SEQ ID NO: 30863 - RNA, 22 nt, synthetic construct
  source 1..22: mol_type = other RNA
ttagtgaaccttctctctctgg

SEQ ID NO: 30864 - RNA, 22 nt, synthetic construct
  source 1..22: mol_type = other RNA
ttagttacctttttccatgttt

SEQ ID NO: 30865 - RNA, 22 nt, synthetic construct
  source 1..22: mol_type = other RNA
ttatagagtcaccttccaaatt

SEQ ID NO: 30866 - RNA, 22 nt, synthetic construct
  source 1..22: mol_type = other RNA
ttatagtcagaccatgaaatca

SEQ ID NO: 30867 - RNA, 22 nt, synthetic construct
  source 1..22: mol_type = other RNA
ttatatccctgtagaactgaag

SEQ ID NO: 30868 - RNA, 22 nt, synthetic construct
  source 1..22: mol_type = other RNA
ttatattctgtacttcctccag

SEQ ID NO: 30869 - RNA, 22 nt, synthetic construct
  source 1..22: mol_type = other RNA
ttatcacagcttgcaggtggat

SEQ ID NO: 30870 - RNA, 22 nt, synthetic construct
  source 1..22: mol_type = other RNA
ttatcactcaaatcggagacat

SEQ ID NO: 30871 - RNA, 22 nt, synthetic construct
  source 1..22: mol_type = other RNA
ttatcagcatcatcagcatcac

SEQ ID NO: 30872 - RNA, 22 nt, synthetic construct
  source 1..22: mol_type = other RNA
ttatccagattgtgtttccatt

SEQ ID NO: 30873 - RNA, 22 nt, synthetic construct
  source 1..22: mol_type = other RNA
ttatgaggcttatgttgcaaaa

SEQ ID NO: 30874 - RNA, 22 nt, synthetic construct
  source 1..22: mol_type = other RNA
ttatgagtctcgaactcgcttg

SEQ ID NO: 30875 - RNA, 22 nt, synthetic construct
  source 1..22: mol_type = other RNA
ttatgcttgaggtgttctgaca

SEQ ID NO: 30876 - RNA, 22 nt, synthetic construct
  source 1..22: mol_type = other RNA
ttatggaataccctgtatgaag

SEQ ID NO: 30877 - RNA, 22 nt, synthetic construct
  source 1..22: mol_type = other RNA
ttatggtcaaataacgacttgg

SEQ ID NO: 30878 - RNA, 22 nt, synthetic construct
  source 1..22: mol_type = other RNA
ttatgtatcaagtacctttgct

SEQ ID NO: 30879 - RNA, 22 nt, synthetic construct
  source 1..22: mol_type = other RNA
ttatgtccccagtgttgaaaca

SEQ ID NO: 30880 - RNA, 22 nt, synthetic construct
  source 1..22: mol_type = other RNA
ttatgtgagatgtggttttctg

SEQ ID NO: 30881 - RNA, 22 nt, synthetic construct
  source 1..22: mol_type = other RNA
ttatgtgttgaaaaactggtga

SEQ ID NO: 30882 - RNA, 22 nt, synthetic construct
  source 1..22: mol_type = other RNA
ttatgttgcaaaaggtgtgagt

SEQ ID NO: 30883 - RNA, 22 nt, synthetic construct
  source 1..22: mol_type = other RNA
ttattatggaataccctgtatg

SEQ ID NO: 30884 - RNA, 22 nt, synthetic construct
  source 1..22: mol_type = other RNA
ttattcctccattttgcaaaca

SEQ ID NO: 30885 - RNA, 22 nt, synthetic construct
  source 1..22: mol_type = other RNA
ttattctctgaaactaggtgtg

SEQ ID NO: 30886 - RNA, 22 nt, synthetic construct
  source 1..22: mol_type = other RNA
ttattctgaggcctttcagaaa

SEQ ID NO: 30887 - RNA, 22 nt, synthetic construct
  source 1..22: mol_type = other RNA
ttattgagaacagaagcagctg

SEQ ID NO: 30888 - RNA, 22 nt, synthetic construct
  source 1..22: mol_type = other RNA
ttattggatacacctgtcaaga

SEQ ID NO: 30889 - RNA, 22 nt, synthetic construct
  source 1..22: mol_type = other RNA
ttatttgaccataaggctctta

SEQ ID NO: 30890 - RNA, 22 nt, synthetic construct
  source 1..22: mol_type = other RNA
ttatttgtaatttttgctgctg

SEQ ID NO: 30891 - RNA, 22 nt, synthetic construct
  source 1..22: mol_type = other RNA
ttattttctgcaggagatgggc

SEQ ID NO: 30892 - RNA, 22 nt, synthetic construct
  source 1..22: mol_type = other RNA
ttcaaaatcaagcgagttcgag

SEQ ID NO: 30893 - RNA, 22 nt, synthetic construct
  source 1..22: mol_type = other RNA
ttcaaacaatacacacctagtt

SEQ ID NO: 30894 - RNA, 22 nt, synthetic construct
  source 1..22: mol_type = other RNA
ttcaaactcacaccttttgcaa

SEQ ID NO: 30895 - RNA, 22 nt, synthetic construct
  source 1..22: mol_type = other RNA
ttcaacaaagagcagattccca

SEQ ID NO: 30896 - RNA, 22 nt, synthetic construct
  source 1..22: mol_type = other RNA
ttcaacacataactgcagtggg

SEQ ID NO: 30897 - RNA, 22 nt, synthetic construct
  source 1..22: mol_type = other RNA
ttcaacactggggacataagtt

SEQ ID NO: 30898 - RNA, 22 nt, synthetic construct
  source 1..22: mol_type = other RNA
ttcaacttggtacatttgtgac

SEQ ID NO: 30899 - RNA, 22 nt, synthetic construct
  source 1..22: mol_type = other RNA
ttcaacttttacttgcttctgt

SEQ ID NO: 30900 - RNA, 22 nt, synthetic construct
  source 1..22: mol_type = other RNA
ttcaagaacaggagcagaagtc

SEQ ID NO: 30901 - RNA, 22 nt, synthetic construct
  source 1..22: mol_type = other RNA
ttcaagcaaagctcagtgttca

SEQ ID NO: 30902 - RNA, 22 nt, synthetic construct
  source 1..22: mol_type = other RNA
ttcaagtgctgtttcaacactg

SEQ ID NO: 30903 - RNA, 22 nt, synthetic construct
  source 1..22: mol_type = other RNA
ttcaatccatcctggtttcaga

SEQ ID NO: 30904 - RNA, 22 nt, synthetic construct
  source 1..22: mol_type = other RNA
ttcaattcaatccatcctggtt

SEQ ID NO: 30905 - RNA, 22 nt, synthetic construct
  source 1..22: mol_type = other RNA
ttcaatttcttgatctgaagga

SEQ ID NO: 30906 - RNA, 22 nt, synthetic construct
  source 1..22: mol_type = other RNA
ttcacacaattattctgaggcc

SEQ ID NO: 30907 - RNA, 22 nt, synthetic construct
  source 1..22: mol_type = other RNA
ttcacaggtgctttcaagaaca

SEQ ID NO: 30908 - RNA, 22 nt, synthetic construct
  source 1..22: mol_type = other RNA
ttcacatctccctcaaaaccag

SEQ ID NO: 30909 - RNA, 22 nt, synthetic construct
  source 1..22: mol_type = other RNA
ttcaccaagcggaatcccatct

SEQ ID NO: 30910 - RNA, 22 nt, synthetic construct
  source 1..22: mol_type = other RNA
ttcaccagacgctagctttgtg

SEQ ID NO: 30911 - RNA, 22 nt, synthetic construct
  source 1..22: mol_type = other RNA
ttcaccagtttttcaacacata

SEQ ID NO: 30912 - RNA, 22 nt, synthetic construct
  source 1..22: mol_type = other RNA
ttcaccatgaaaacattcttcc

SEQ ID NO: 30913 - RNA, 22 nt, synthetic construct
  source 1..22: mol_type = other RNA
ttcaccatgtgtgtgttccacg

SEQ ID NO: 30914 - RNA, 22 nt, synthetic construct
  source 1..22: mol_type = other RNA
ttcacctggatttctttcttgg

SEQ ID NO: 30915 - RNA, 22 nt, synthetic construct
  source 1..22: mol_type = other RNA
ttcacgccaagtcgttatttga

SEQ ID NO: 30916 - RNA, 22 nt, synthetic construct
  source 1..22: mol_type = other RNA
ttcactaactgtgcgttttatt

SEQ ID NO: 30917 - RNA, 22 nt, synthetic construct
  source 1..22: mol_type = other RNA
ttcactaaggattccttttctg

SEQ ID NO: 30918 - RNA, 22 nt, synthetic construct
  source 1..22: mol_type = other RNA
ttcacttcccttaaaagtgttg

SEQ ID NO: 30919 - RNA, 22 nt, synthetic construct
  source 1..22: mol_type = other RNA
ttcagaaaagacaccaaccaaa

SEQ ID NO: 30920 - RNA, 22 nt, synthetic construct
  source 1..22: mol_type = other RNA
ttcagaaaccagaacaactaca

SEQ ID NO: 30921 - RNA, 22 nt, synthetic construct
  source 1..22: mol_type = other RNA
ttcagaaagcatcggagaaggg

SEQ ID NO: 30922 - RNA, 22 nt, synthetic construct
  source 1..22: mol_type = other RNA
ttcagaaggaaaaagcactctg

SEQ ID NO: 30923 - RNA, 22 nt, synthetic construct
  source 1..22: mol_type = other RNA
ttcagaatctcttgctctttgt

SEQ ID NO: 30924 - RNA, 22 nt, synthetic construct
  source 1..22: mol_type = other RNA
ttcagaatctgaagctctggat

SEQ ID NO: 30925 - RNA, 22 nt, synthetic construct
  source 1..22: mol_type = other RNA
ttcagagaataaagaacagact

SEQ ID NO: 30926 - RNA, 22 nt, synthetic construct
  source 1..22: mol_type = other RNA
ttcagagactgagccattttca

SEQ ID NO: 30927 - RNA, 22 nt, synthetic construct
  source 1..22: mol_type = other RNA
ttcagagctgccaccaggagct

SEQ ID NO: 30928 - RNA, 22 nt, synthetic construct
  source 1..22: mol_type = other RNA
ttcagagtgctttttccttctg

SEQ ID NO: 30929 - RNA, 22 nt, synthetic construct
  source 1..22: mol_type = other RNA
ttcagatagtgctgtgttgggg

SEQ ID NO: 30930 - RNA, 22 nt, synthetic construct
  source 1..22: mol_type = other RNA
ttcagatcaagaaattgaaaca

SEQ ID NO: 30931 - RNA, 22 nt, synthetic construct
  source 1..22: mol_type = other RNA
ttcagatgctgctccatggtct

SEQ ID NO: 30932 - RNA, 22 nt, synthetic construct
  source 1..22: mol_type = other RNA
ttcagattctgaatgagcagga

SEQ ID NO: 30933 - RNA, 22 nt, synthetic construct
  source 1..22: mol_type = other RNA
ttcaggatgtgtagtctgttct

SEQ ID NO: 30934 - RNA, 22 nt, synthetic construct
  source 1..22: mol_type = other RNA
ttcaggcccactgcagttatgt

SEQ ID NO: 30935 - RNA, 22 nt, synthetic construct
  source 1..22: mol_type = other RNA
ttcaggttccagcagcaatttg

SEQ ID NO: 30936 - RNA, 22 nt, synthetic construct
  source 1..22: mol_type = other RNA
ttcagtatcaacccaatctctc

SEQ ID NO: 30937 - RNA, 22 nt, synthetic construct
  source 1..22: mol_type = other RNA
ttcagttctacagggatataaa

SEQ ID NO: 30938 - RNA, 22 nt, synthetic construct
  source 1..22: mol_type = other RNA
ttcagtttgggaatctgctctt

SEQ ID NO: 30939 - RNA, 22 nt, synthetic construct
  source 1..22: mol_type = other RNA
ttcatacagggtattccataat

SEQ ID NO: 30940 - RNA, 22 nt, synthetic construct
  source 1..22: mol_type = other RNA
ttcatggtctgactataagggg

SEQ ID NO: 30941 - RNA, 22 nt, synthetic construct
  source 1..22: mol_type = other RNA
ttcatggtgaaaatcagtattc

SEQ ID NO: 30942 - RNA, 22 nt, synthetic construct
  source 1..22: mol_type = other RNA
ttcatttcaacttggtacattt

SEQ ID NO: 30943 - RNA, 22 nt, synthetic construct
  source 1..22: mol_type = other RNA
ttcattttcaacaaagagcaga

SEQ ID NO: 30944 - RNA, 22 nt, synthetic construct
  source 1..22: mol_type = other RNA
ttccaaaaaccctcacaccagg

SEQ ID NO: 30945 - RNA, 22 nt, synthetic construct
  source 1..22: mol_type = other RNA
ttccaaataatgtgatcccaaa

SEQ ID NO: 30946 - RNA, 22 nt, synthetic construct
  source 1..22: mol_type = other RNA
ttccaaattactagatactcct

SEQ ID NO: 30947 - RNA, 22 nt, synthetic construct
  source 1..22: mol_type = other RNA
ttccaacatgcctggggggctc

SEQ ID NO: 30948 - RNA, 22 nt, synthetic construct
  source 1..22: mol_type = other RNA
ttccaagtgtttgcaaaatgga

SEQ ID NO: 30949 - RNA, 22 nt, synthetic construct
  source 1..22: mol_type = other RNA
ttccacaggttcctcagcttcc

SEQ ID NO: 30950 - RNA, 22 nt, synthetic construct
  source 1..22: mol_type = other RNA
ttccaccttaattggcctgtgc

SEQ ID NO: 30951 - RNA, 22 nt, synthetic construct
  source 1..22: mol_type = other RNA
ttccacggaagaggcagaaact

SEQ ID NO: 30952 - RNA, 22 nt, synthetic construct
  source 1..22: mol_type = other RNA
ttccactttagtctggccaaag

SEQ ID NO: 30953 - RNA, 22 nt, synthetic construct
  source 1..22: mol_type = other RNA
ttccagcagcaatttgcaagct

SEQ ID NO: 30954 - RNA, 22 nt, synthetic construct
  source 1..22: mol_type = other RNA
ttccaggagttcaccatgtgtg

SEQ ID NO: 30955 - RNA, 22 nt, synthetic construct
  source 1..22: mol_type = other RNA
ttccagtgtattgtttggaggt

SEQ ID NO: 30956 - RNA, 22 nt, synthetic construct
  source 1..22: mol_type = other RNA
ttccatcaggcttgcttcgggg

SEQ ID NO: 30957 - RNA, 22 nt, synthetic construct
  source 1..22: mol_type = other RNA
ttccatgttttgttttctggtg

SEQ ID NO: 30958 - RNA, 22 nt, synthetic construct
  source 1..22: mol_type = other RNA
ttccattctggagctttgtagc

SEQ ID NO: 30959 - RNA, 22 nt, synthetic construct
  source 1..22: mol_type = other RNA
ttccattgcggtgcagaaaacc

SEQ ID NO: 30960 - RNA, 22 nt, synthetic construct
  source 1..22: mol_type = other RNA
ttccattgtgttctgagaaaac

SEQ ID NO: 30961 - RNA, 22 nt, synthetic construct
  source 1..22: mol_type = other RNA
ttcccaaactgaaaaacttatg

SEQ ID NO: 30962 - RNA, 22 nt, synthetic construct
  source 1..22: mol_type = other RNA
ttcccagagtcctaatccatct

SEQ ID NO: 30963 - RNA, 22 nt, synthetic construct
  source 1..22: mol_type = other RNA
ttcccatcttgcagatgtgtag

SEQ ID NO: 30964 - RNA, 22 nt, synthetic construct
  source 1..22: mol_type = other RNA
ttcccctcctgctcattcagaa

SEQ ID NO: 30965 - RNA, 22 nt, synthetic construct
  source 1..22: mol_type = other RNA
ttccccttatagtcagaccatg

SEQ ID NO: 30966 - RNA, 22 nt, synthetic construct
  source 1..22: mol_type = other RNA
ttccctggatgttattttctgc

SEQ ID NO: 30967 - RNA, 22 nt, synthetic construct
  source 1..22: mol_type = other RNA
ttcccttaaaagtgttgtgtta

SEQ ID NO: 30968 - RNA, 22 nt, synthetic construct
  source 1..22: mol_type = other RNA
ttcccttcatacagggtattcc

SEQ ID NO: 30969 - RNA, 22 nt, synthetic construct
  source 1..22: mol_type = other RNA
ttccgcacagacctctaactct

SEQ ID NO: 30970 - RNA, 22 nt, synthetic construct
  source 1..22: mol_type = other RNA
ttccgcttggtgaaaacgaggg

SEQ ID NO: 30971 - RNA, 22 nt, synthetic construct
  source 1..22: mol_type = other RNA
ttccgtggaacacacacatggt

SEQ ID NO: 30972 - RNA, 22 nt, synthetic construct
  source 1..22: mol_type = other RNA
ttcctcacccccaaagcaacaa

SEQ ID NO: 30973 - RNA, 22 nt, synthetic construct
  source 1..22: mol_type = other RNA
ttcctcagcttccttcagaagg

SEQ ID NO: 30974 - RNA, 22 nt, synthetic construct
  source 1..22: mol_type = other RNA
ttcctccagtcccatttggaca

SEQ ID NO: 30975 - RNA, 22 nt, synthetic construct
  source 1..22: mol_type = other RNA
ttcctccattttgcaaacactt

SEQ ID NO: 30976 - RNA, 22 nt, synthetic construct
  source 1..22: mol_type = other RNA
ttcctccctggtcaggcacagg

SEQ ID NO: 30977 - RNA, 22 nt, synthetic construct
  source 1..22: mol_type = other RNA
ttcctgataccatcacctccca

SEQ ID NO: 30978 - RNA, 22 nt, synthetic construct
  source 1..22: mol_type = other RNA
ttcctgcaaaaagttcaggatg

SEQ ID NO: 30979 - RNA, 22 nt, synthetic construct
  source 1..22: mol_type = other RNA
ttcctgtgcctgaccagggagg

SEQ ID NO: 30980 - RNA, 22 nt, synthetic construct
  source 1..22: mol_type = other RNA
ttcctgttcacacaattattct

SEQ ID NO: 30981 - RNA, 22 nt, synthetic construct
  source 1..22: mol_type = other RNA
ttccttcagaaggaaaaagcac

SEQ ID NO: 30982 - RNA, 22 nt, synthetic construct
  source 1..22: mol_type = other RNA
ttccttctgaaggaagctgagg

SEQ ID NO: 30983 - RNA, 22 nt, synthetic construct
  source 1..22: mol_type = other RNA
ttcctttcagaaaccagaacaa

SEQ ID NO: 30984 - RNA, 22 nt, synthetic construct
  source 1..22: mol_type = other RNA
ttccttttctgccactaccaca

SEQ ID NO: 30985 - RNA, 22 nt, synthetic construct
  source 1..22: mol_type = other RNA
ttcgagactcataatgtccaaa

SEQ ID NO: 30986 - RNA, 22 nt, synthetic construct
  source 1..22: mol_type = other RNA
ttcggggccatccacaaggctg

SEQ ID NO: 30987 - RNA, 22 nt, synthetic construct
  source 1..22: mol_type = other RNA
ttcggggtaagccaagaaagaa

SEQ ID NO: 30988 - RNA, 22 nt, synthetic construct
  source 1..22: mol_type = other RNA
ttctaaaactccaccattcaga

SEQ ID NO: 30989 - RNA, 22 nt, synthetic construct
  source 1..22: mol_type = other RNA
ttctacagggatataaaaatag

SEQ ID NO: 30990 - RNA, 22 nt, synthetic construct
  source 1..22: mol_type = other RNA
ttctacgatttatattctgtac

SEQ ID NO: 30991 - RNA, 22 nt, synthetic construct
  source 1..22: mol_type = other RNA
ttctatcctgttccatcaggct

SEQ ID NO: 30992 - RNA, 22 nt, synthetic construct
  source 1..22: mol_type = other RNA
ttctatttttatatccctgtag

SEQ ID NO: 30993 - RNA, 22 nt, synthetic construct
  source 1..22: mol_type = other RNA
ttctcagaacacaatggaacag

SEQ ID NO: 30994 - RNA, 22 nt, synthetic construct
  source 1..22: mol_type = other RNA
ttctcatcaactgctggcagtt

SEQ ID NO: 30995 - RNA, 22 nt, synthetic construct
  source 1..22: mol_type = other RNA
ttctccaaaacagaccatttac

SEQ ID NO: 30996 - RNA, 22 nt, synthetic construct
  source 1..22: mol_type = other RNA
ttctccattagccttttggtct

SEQ ID NO: 30997 - RNA, 22 nt, synthetic construct
  source 1..22: mol_type = other RNA
ttctccccctcctcctcttcca

SEQ ID NO: 30998 - RNA, 22 nt, synthetic construct
  source 1..22: mol_type = other RNA
ttctccgatgctttctgaaagg

SEQ ID NO: 30999 - RNA, 22 nt, synthetic construct
  source 1..22: mol_type = other RNA
ttctctctctgggctccttcag

SEQ ID NO: 31000 - RNA, 22 nt, synthetic construct
  source 1..22: mol_type = other RNA
ttctctgaaactaggtgtgtat

SEQ ID NO: 31001 - RNA, 22 nt, synthetic construct
  source 1..22: mol_type = other RNA
ttctcttgcttagttacctttt

SEQ ID NO: 31002 - RNA, 22 nt, synthetic construct
  source 1..22: mol_type = other RNA
ttctctttgctgatcattgttg

SEQ ID NO: 31003 - RNA, 22 nt, synthetic construct
  source 1..22: mol_type = other RNA
ttctgaaaggaacaggtattta

SEQ ID NO: 31004 - RNA, 22 nt, synthetic construct
  source 1..22: mol_type = other RNA
ttctgaaaggcctcagaataat

SEQ ID NO: 31005 - RNA, 22 nt, synthetic construct
  source 1..22: mol_type = other RNA
ttctgaagaagttgtttgctgc

SEQ ID NO: 31006 - RNA, 22 nt, synthetic construct
  source 1..22: mol_type = other RNA
ttctgaaggaagctgaggaacc

SEQ ID NO: 31007 - RNA, 22 nt, synthetic construct
  source 1..22: mol_type = other RNA
ttctgaagggtcgagacaagga

SEQ ID NO: 31008 - RNA, 22 nt, synthetic construct
  source 1..22: mol_type = other RNA
ttctgaatgagcaggaggggaa

SEQ ID NO: 31009 - RNA, 22 nt, synthetic construct
  source 1..22: mol_type = other RNA
ttctgacattggtcttgttttc

SEQ ID NO: 31010 - RNA, 22 nt, synthetic construct
  source 1..22: mol_type = other RNA
ttctgagaaaacaagaccaatg

SEQ ID NO: 31011 - RNA, 22 nt, synthetic construct
  source 1..22: mol_type = other RNA
ttctgaggcctttcagaaagca

SEQ ID NO: 31012 - RNA, 22 nt, synthetic construct
  source 1..22: mol_type = other RNA
ttctgcaccgcaatggaaacac

SEQ ID NO: 31013 - RNA, 22 nt, synthetic construct
  source 1..22: mol_type = other RNA
ttctgcagcagtggtttgtcta

SEQ ID NO: 31014 - RNA, 22 nt, synthetic construct
  source 1..22: mol_type = other RNA
ttctgcaggagatgggcatatc

SEQ ID NO: 31015 - RNA, 22 nt, synthetic construct
  source 1..22: mol_type = other RNA
ttctgccactaccacaccacca

SEQ ID NO: 31016 - RNA, 22 nt, synthetic construct
  source 1..22: mol_type = other RNA
ttctgcctcttccgtggaacac

SEQ ID NO: 31017 - RNA, 22 nt, synthetic construct
  source 1..22: mol_type = other RNA
ttctgctcctgttcttgaaagc

SEQ ID NO: 31018 - RNA, 22 nt, synthetic construct
  source 1..22: mol_type = other RNA
ttctggagctttgtagccagag

SEQ ID NO: 31019 - RNA, 22 nt, synthetic construct
  source 1..22: mol_type = other RNA
ttctggatgagctctctcaggc

SEQ ID NO: 31020 - RNA, 22 nt, synthetic construct
  source 1..22: mol_type = other RNA
ttctggcacttacctacacatc

SEQ ID NO: 31021 - RNA, 22 nt, synthetic construct
  source 1..22: mol_type = other RNA
ttctggcttcccttcatacagg

SEQ ID NO: 31022 - RNA, 22 nt, synthetic construct
  source 1..22: mol_type = other RNA
ttctggggaggggtctgagtgt

SEQ ID NO: 31023 - RNA, 22 nt, synthetic construct
  source 1..22: mol_type = other RNA
ttctgggtgtaagcttgccttg

SEQ ID NO: 31024 - RNA, 22 nt, synthetic construct
  source 1..22: mol_type = other RNA
ttctggtggtgctgtgtgcata

SEQ ID NO: 31025 - RNA, 22 nt, synthetic construct
  source 1..22: mol_type = other RNA
ttctggtttctgaaaggaacag

SEQ ID NO: 31026 - RNA, 22 nt, synthetic construct
  source 1..22: mol_type = other RNA
ttctgtaagagatgccacctta

SEQ ID NO: 31027 - RNA, 22 nt, synthetic construct
  source 1..22: mol_type = other RNA
ttctgtacttcctccagtccca

SEQ ID NO: 31028 - RNA, 22 nt, synthetic construct
  source 1..22: mol_type = other RNA
ttctgtagcccaagaaaatgca

SEQ ID NO: 31029 - RNA, 22 nt, synthetic construct
  source 1..22: mol_type = other RNA
ttctgtctggcaaatgggaggt

SEQ ID NO: 31030 - RNA, 22 nt, synthetic construct
  source 1..22: mol_type = other RNA
ttctgtgatttgagagtaagag

SEQ ID NO: 31031 - RNA, 22 nt, synthetic construct
  source 1..22: mol_type = other RNA
ttctgttcaggttccagcagca

SEQ ID NO: 31032 - RNA, 22 nt, synthetic construct
  source 1..22: mol_type = other RNA
ttcttatcactcaaatcggaga

SEQ ID NO: 31033 - RNA, 22 nt, synthetic construct
  source 1..22: mol_type = other RNA
ttcttcacaggtgctttcaaga

SEQ ID NO: 31034 - RNA, 22 nt, synthetic construct
  source 1..22: mol_type = other RNA
ttcttcaccagacgctagcttt

SEQ ID NO: 31035 - RNA, 22 nt, synthetic construct
  source 1..22: mol_type = other RNA
ttcttcagaaaagacaccaacc

SEQ ID NO: 31036 - RNA, 22 nt, synthetic construct
  source 1..22: mol_type = other RNA
ttcttcagtatcaacccaatct

SEQ ID NO: 31037 - RNA, 22 nt, synthetic construct
  source 1..22: mol_type = other RNA
ttcttccactttagtctggcca

SEQ ID NO: 31038 - RNA, 22 nt, synthetic construct
  source 1..22: mol_type = other RNA
ttcttctaaaactccaccattc

SEQ ID NO: 31039 - RNA, 22 nt, synthetic construct
  source 1..22: mol_type = other RNA
ttcttgaaagcacctgtgaaga

SEQ ID NO: 31040 - RNA, 22 nt, synthetic construct
  source 1..22: mol_type = other RNA
ttcttgatctgaaggagcccag

SEQ ID NO: 31041 - RNA, 22 nt, synthetic construct
  source 1..22: mol_type = other RNA
ttcttgcttctgtaagagatgc

SEQ ID NO: 31042 - RNA, 22 nt, synthetic construct
  source 1..22: mol_type = other RNA
ttcttggcttaccccgaagtta

SEQ ID NO: 31043 - RNA, 22 nt, synthetic construct
  source 1..22: mol_type = other RNA
ttcttgggctacagaactcaca

SEQ ID NO: 31044 - RNA, 22 nt, synthetic construct
  source 1..22: mol_type = other RNA
ttcttgtcatggtaattagcac

SEQ ID NO: 31045 - RNA, 22 nt, synthetic construct
  source 1..22: mol_type = other RNA
ttcttgtgtaaagtcaggactc

SEQ ID NO: 31046 - RNA, 22 nt, synthetic construct
  source 1..22: mol_type = other RNA
ttcttgttcaaacaatacacac

SEQ ID NO: 31047 - RNA, 22 nt, synthetic construct
  source 1..22: mol_type = other RNA
ttctttattctctgaaactagg

SEQ ID NO: 31048 - RNA, 22 nt, synthetic construct
  source 1..22: mol_type = other RNA
ttctttctccccctcctcctct

SEQ ID NO: 31049 - RNA, 22 nt, synthetic construct
  source 1..22: mol_type = other RNA
ttctttcttatcactcaaatcg

SEQ ID NO: 31050 - RNA, 22 nt, synthetic construct
  source 1..22: mol_type = other RNA
ttctttcttggcttaccccgaa

SEQ ID NO: 31051 - RNA, 22 nt, synthetic construct
  source 1..22: mol_type = other RNA
ttctttggccagactaaagtgg

SEQ ID NO: 31052 - RNA, 22 nt, synthetic construct
  source 1..22: mol_type = other RNA
ttcttttggttggtgtcttttc

SEQ ID NO: 31053 - RNA, 22 nt, synthetic construct
  source 1..22: mol_type = other RNA
ttgaaaaactggtgaaatcttt

SEQ ID NO: 31054 - RNA, 22 nt, synthetic construct
  source 1..22: mol_type = other RNA
ttgaaaatgaaatctagtgcca

SEQ ID NO: 31055 - RNA, 22 nt, synthetic construct
  source 1..22: mol_type = other RNA
ttgaaaatggctcagtctctga

SEQ ID NO: 31056 - RNA, 22 nt, synthetic construct
  source 1..22: mol_type = other RNA
ttgaaacaagaccaaaaggcta

SEQ ID NO: 31057 - RNA, 22 nt, synthetic construct
  source 1..22: mol_type = other RNA
ttgaaacagcacttgaatcaac

SEQ ID NO: 31058 - RNA, 22 nt, synthetic construct
  source 1..22: mol_type = other RNA
ttgaaagagtgccacttggtgt

SEQ ID NO: 31059 - RNA, 22 nt, synthetic construct
  source 1..22: mol_type = other RNA
ttgaaagcacctgtgaagaaga

SEQ ID NO: 31060 - RNA, 22 nt, synthetic construct
  source 1..22: mol_type = other RNA
ttgaaatgaatcaagggcagtc

SEQ ID NO: 31061 - RNA, 22 nt, synthetic construct
  source 1..22: mol_type = other RNA
ttgaaatgtcagggccagtcac

SEQ ID NO: 31062 - RNA, 22 nt, synthetic construct
  source 1..22: mol_type = other RNA
ttgaacaagaaacctgtatttt

SEQ ID NO: 31063 - RNA, 22 nt, synthetic construct
  source 1..22: mol_type = other RNA
ttgaaggcccctcgttttcacc

SEQ ID NO: 31064 - RNA, 22 nt, synthetic construct
  source 1..22: mol_type = other RNA
ttgaagtaagcaccattcattt

SEQ ID NO: 31065 - RNA, 22 nt, synthetic construct
  source 1..22: mol_type = other RNA
ttgaatactgattttcaccatg

SEQ ID NO: 31066 - RNA, 22 nt, synthetic construct
  source 1..22: mol_type = other RNA
ttgaatcaacaggcttcagaga

SEQ ID NO: 31067 - RNA, 22 nt, synthetic construct
  source 1..22: mol_type = other RNA
ttgaattgaaggcccctcgttt

SEQ ID NO: 31068 - RNA, 22 nt, synthetic construct
  source 1..22: mol_type = other RNA
ttgacaggtgtatccaataaat

SEQ ID NO: 31069 - RNA, 22 nt, synthetic construct
  source 1..22: mol_type = other RNA
ttgaccagacatatcttggttt

SEQ ID NO: 31070 - RNA, 22 nt, synthetic construct
  source 1..22: mol_type = other RNA
ttgaccataaggctcttactct

SEQ ID NO: 31071 - RNA, 22 nt, synthetic construct
  source 1..22: mol_type = other RNA
ttgactagacaaaccactgctg

SEQ ID NO: 31072 - RNA, 22 nt, synthetic construct
  source 1..22: mol_type = other RNA
ttgactgctttcacctggattt

SEQ ID NO: 31073 - RNA, 22 nt, synthetic construct
  source 1..22: mol_type = other RNA
ttgagaacagaagcagctgttc

SEQ ID NO: 31074 - RNA, 22 nt, synthetic construct
  source 1..22: mol_type = other RNA
ttgagacagtgttttttccagg

SEQ ID NO: 31075 - RNA, 22 nt, synthetic construct
  source 1..22: mol_type = other RNA
ttgagaccatggagcagcatct

SEQ ID NO: 31076 - RNA, 22 nt, synthetic construct
  source 1..22: mol_type = other RNA
ttgagagtaagagccttatggt

SEQ ID NO: 31077 - RNA, 22 nt, synthetic construct
  source 1..22: mol_type = other RNA
ttgagatatgcccatctcctgc

SEQ ID NO: 31078 - RNA, 22 nt, synthetic construct
  source 1..22: mol_type = other RNA
ttgagggagatgtgaactctgg

SEQ ID NO: 31079 - RNA, 22 nt, synthetic construct
  source 1..22: mol_type = other RNA
ttgagggcaacagactaagtcc

SEQ ID NO: 31080 - RNA, 22 nt, synthetic construct
  source 1..22: mol_type = other RNA
ttgaggtgttctgacattggtc

SEQ ID NO: 31081 - RNA, 22 nt, synthetic construct
  source 1..22: mol_type = other RNA
ttgagtcttgacaggtgtatcc

SEQ ID NO: 31082 - RNA, 22 nt, synthetic construct
  source 1..22: mol_type = other RNA
ttgagtgataagaaagaatctg

SEQ ID NO: 31083 - RNA, 22 nt, synthetic construct
  source 1..22: mol_type = other RNA
ttgagtgtccttctggggaggg

SEQ ID NO: 31084 - RNA, 22 nt, synthetic construct
  source 1..22: mol_type = other RNA
ttgatacataaccatgcaaatg

SEQ ID NO: 31085 - RNA, 22 nt, synthetic construct
  source 1..22: mol_type = other RNA
ttgatactgaagaattgatggc

SEQ ID NO: 31086 - RNA, 22 nt, synthetic construct
  source 1..22: mol_type = other RNA
ttgatagccacaccccagcttt

SEQ ID NO: 31087 - RNA, 22 nt, synthetic construct
  source 1..22: mol_type = other RNA
ttgatctgaaggagcccagaga

SEQ ID NO: 31088 - RNA, 22 nt, synthetic construct
  source 1..22: mol_type = other RNA
ttgatctgccctgaggtatgcg

SEQ ID NO: 31089 - RNA, 22 nt, synthetic construct
  source 1..22: mol_type = other RNA
ttgatgagaaacaaagagcaag

SEQ ID NO: 31090 - RNA, 22 nt, synthetic construct
  source 1..22: mol_type = other RNA
ttgatggcagtgatgcctcatt

SEQ ID NO: 31091 - RNA, 22 nt, synthetic construct
  source 1..22: mol_type = other RNA
ttgattcaagtgctgtttcaac

SEQ ID NO: 31092 - RNA, 22 nt, synthetic construct
  source 1..22: mol_type = other RNA
ttgattcatttcaacttggtac

SEQ ID NO: 31093 - RNA, 22 nt, synthetic construct
  source 1..22: mol_type = other RNA
ttgattggagagattgggttga

SEQ ID NO: 31094 - RNA, 22 nt, synthetic construct
  source 1..22: mol_type = other RNA
ttgatttcatggtctgactata

SEQ ID NO: 31095 - RNA, 22 nt, synthetic construct
  source 1..22: mol_type = other RNA
ttgcaaaaggtgtgagtttgaa

SEQ ID NO: 31096 - RNA, 22 nt, synthetic construct
  source 1..22: mol_type = other RNA
ttgcaaaatggaggaataaaac

SEQ ID NO: 31097 - RNA, 22 nt, synthetic construct
  source 1..22: mol_type = other RNA
ttgcaaacacttggaataccct

SEQ ID NO: 31098 - RNA, 22 nt, synthetic construct
  source 1..22: mol_type = other RNA
ttgcaaattgctgctggaacct

SEQ ID NO: 31099 - RNA, 22 nt, synthetic construct
  source 1..22: mol_type = other RNA
ttgcaacataagcctcataaac

SEQ ID NO: 31100 - RNA, 22 nt, synthetic construct
  source 1..22: mol_type = other RNA
ttgcaagctcctggtggcagct

SEQ ID NO: 31101 - RNA, 22 nt, synthetic construct
  source 1..22: mol_type = other RNA
ttgcagatgtgtaggtaagtgc

SEQ ID NO: 31102 - RNA, 22 nt, synthetic construct
  source 1..22: mol_type = other RNA
ttgcagctagtttactggcatt

SEQ ID NO: 31103 - RNA, 22 nt, synthetic construct
  source 1..22: mol_type = other RNA
ttgcaggaaacaagacccaaaa

SEQ ID NO: 31104 - RNA, 22 nt, synthetic construct
  source 1..22: mol_type = other RNA
ttgcaggtggattctcttgctt

SEQ ID NO: 31105 - RNA, 22 nt, synthetic construct
  source 1..22: mol_type = other RNA
ttgcatcacatgcaatattttc

SEQ ID NO: 31106 - RNA, 22 nt, synthetic construct
  source 1..22: mol_type = other RNA
ttgcatccaggttccaccttaa

SEQ ID NO: 31107 - RNA, 22 nt, synthetic construct
  source 1..22: mol_type = other RNA
ttgcatgcacttgatttcatgg

SEQ ID NO: 31108 - RNA, 22 nt, synthetic construct
  source 1..22: mol_type = other RNA
ttgcatggttatgtatcaagta

SEQ ID NO: 31109 - RNA, 22 nt, synthetic construct
  source 1..22: mol_type = other RNA
ttgcatgtgatgcaagttttgg

SEQ ID NO: 31110 - RNA, 22 nt, synthetic construct
  source 1..22: mol_type = other RNA
ttgccagacagaacctctggct

SEQ ID NO: 31111 - RNA, 22 nt, synthetic construct
  source 1..22: mol_type = other RNA
ttgccatagtcagatgcacagg

SEQ ID NO: 31112 - RNA, 22 nt, synthetic construct
  source 1..22: mol_type = other RNA
ttgccctcaacatggttggttc

SEQ ID NO: 31113 - RNA, 22 nt, synthetic construct
  source 1..22: mol_type = other RNA
ttgccttgggagccccccaggc

SEQ ID NO: 31114 - RNA, 22 nt, synthetic construct
  source 1..22: mol_type = other RNA
ttgcgcagcttgttgaccagac

SEQ ID NO: 31115 - RNA, 22 nt, synthetic construct
  source 1..22: mol_type = other RNA
ttgcggtgcagaaaaccacatc

SEQ ID NO: 31116 - RNA, 22 nt, synthetic construct
  source 1..22: mol_type = other RNA
ttgctcagcaaaggtacttgat

SEQ ID NO: 31117 - RNA, 22 nt, synthetic construct
  source 1..22: mol_type = other RNA
ttgctccttgtctcgacccttc

SEQ ID NO: 31118 - RNA, 22 nt, synthetic construct
  source 1..22: mol_type = other RNA
ttgctctttgtttctcatcaac

SEQ ID NO: 31119 - RNA, 22 nt, synthetic construct
  source 1..22: mol_type = other RNA
ttgctgagcaagttgcgcagct

SEQ ID NO: 31120 - RNA, 22 nt, synthetic construct
  source 1..22: mol_type = other RNA
ttgctgatcattgttgctttgg

SEQ ID NO: 31121 - RNA, 22 nt, synthetic construct
  source 1..22: mol_type = other RNA
ttgctgcacattatcacagctt

SEQ ID NO: 31122 - RNA, 22 nt, synthetic construct
  source 1..22: mol_type = other RNA
ttgctgctctaaagctggggtg

SEQ ID NO: 31123 - RNA, 22 nt, synthetic construct
  source 1..22: mol_type = other RNA
ttgctgctggaacctgaacaga

SEQ ID NO: 31124 - RNA, 22 nt, synthetic construct
  source 1..22: mol_type = other RNA
ttgctgctgttcttgcttctgt

SEQ ID NO: 31125 - RNA, 22 nt, synthetic construct
  source 1..22: mol_type = other RNA
ttgctgctgttgctggttttga

SEQ ID NO: 31126 - RNA, 22 nt, synthetic construct
  source 1..22: mol_type = other RNA
ttgctggttttgagggagatgt

SEQ ID NO: 31127 - RNA, 22 nt, synthetic construct
  source 1..22: mol_type = other RNA
ttgctgtgtttgctgctgttct

SEQ ID NO: 31128 - RNA, 22 nt, synthetic construct
  source 1..22: mol_type = other RNA
ttgcttagttacctttttccat

SEQ ID NO: 31129 - RNA, 22 nt, synthetic construct
  source 1..22: mol_type = other RNA
ttgcttcggggccatccacaag

SEQ ID NO: 31130 - RNA, 22 nt, synthetic construct
  source 1..22: mol_type = other RNA
ttgcttctgtaagagatgccac

SEQ ID NO: 31131 - RNA, 22 nt, synthetic construct
  source 1..22: mol_type = other RNA
ttgcttctgtgatttgagagta

SEQ ID NO: 31132 - RNA, 22 nt, synthetic construct
  source 1..22: mol_type = other RNA
ttgcttctttctccccctcctc

SEQ ID NO: 31133 - RNA, 22 nt, synthetic construct
  source 1..22: mol_type = other RNA
ttgcttgaagtaagcaccattc

SEQ ID NO: 31134 - RNA, 22 nt, synthetic construct
  source 1..22: mol_type = other RNA
ttgctttgggatcacattattt

SEQ ID NO: 31135 - RNA, 22 nt, synthetic construct
  source 1..22: mol_type = other RNA
ttgctttgggggtgaggaaaag

SEQ ID NO: 31136 - RNA, 22 nt, synthetic construct
  source 1..22: mol_type = other RNA
ttggaaaatattgcatgtgatg

SEQ ID NO: 31137 - RNA, 22 nt, synthetic construct
  source 1..22: mol_type = other RNA
ttggaactggagatgttggtcc

SEQ ID NO: 31138 - RNA, 22 nt, synthetic construct
  source 1..22: mol_type = other RNA
ttggaaggtgactctataaaat

SEQ ID NO: 31139 - RNA, 22 nt, synthetic construct
  source 1..22: mol_type = other RNA
ttggaataccctctactttctt

SEQ ID NO: 31140 - RNA, 22 nt, synthetic construct
  source 1..22: mol_type = other RNA
ttggaatttccagtgtattgtt

SEQ ID NO: 31141 - RNA, 22 nt, synthetic construct
  source 1..22: mol_type = other RNA
ttggacattatgagtctcgaac

SEQ ID NO: 31142 - RNA, 22 nt, synthetic construct
  source 1..22: mol_type = other RNA
ttggagaagtgcacctggtgtg

SEQ ID NO: 31143 - RNA, 22 nt, synthetic construct
  source 1..22: mol_type = other RNA
ttggagagattgggttgatact

SEQ ID NO: 31144 - RNA, 22 nt, synthetic construct
  source 1..22: mol_type = other RNA
ttggaggcagctcagagttaga

SEQ ID NO: 31145 - RNA, 22 nt, synthetic construct
  source 1..22: mol_type = other RNA
ttggaggtcatttgattggaga

SEQ ID NO: 31146 - RNA, 22 nt, synthetic construct
  source 1..22: mol_type = other RNA
ttggatacacctgtcaagactc

SEQ ID NO: 31147 - RNA, 22 nt, synthetic construct
  source 1..22: mol_type = other RNA
ttggccagactaaagtggaaga

SEQ ID NO: 31148 - RNA, 22 nt, synthetic construct
  source 1..22: mol_type = other RNA
ttggcctgtgcatctgactatg

SEQ ID NO: 31149 - RNA, 22 nt, synthetic construct
  source 1..22: mol_type = other RNA
ttggcgtgaaactgcttcagat

SEQ ID NO: 31150 - RNA, 22 nt, synthetic construct
  source 1..22: mol_type = other RNA
ttggcttaccccgaagttacgt

SEQ ID NO: 31151 - RNA, 22 nt, synthetic construct
  source 1..22: mol_type = other RNA
ttgggaatctgctctttgttga

SEQ ID NO: 31152 - RNA, 22 nt, synthetic construct
  source 1..22: mol_type = other RNA
ttgggactgcccttgattcatt

SEQ ID NO: 31153 - RNA, 22 nt, synthetic construct
  source 1..22: mol_type = other RNA
ttgggagccccccaggcatgtt

SEQ ID NO: 31154 - RNA, 22 nt, synthetic construct
  source 1..22: mol_type = other RNA
ttgggatcacattatttggaaa

SEQ ID NO: 31155 - RNA, 22 nt, synthetic construct
  source 1..22: mol_type = other RNA
ttgggctacagaactcacagat

SEQ ID NO: 31156 - RNA, 22 nt, synthetic construct
  source 1..22: mol_type = other RNA
ttgggggcacaagatctcgtgt

SEQ ID NO: 31157 - RNA, 22 nt, synthetic construct
  source 1..22: mol_type = other RNA
ttgggggtgaggaaaagtctgg

SEQ ID NO: 31158 - RNA, 22 nt, synthetic construct
  source 1..22: mol_type = other RNA
ttggggtagtggtggtgttctt

SEQ ID NO: 31159 - RNA, 22 nt, synthetic construct
  source 1..22: mol_type = other RNA
ttggggttgctgtgtttgctgc

SEQ ID NO: 31160 - RNA, 22 nt, synthetic construct
  source 1..22: mol_type = other RNA
ttgggtcttgtttcctgcaaaa

SEQ ID NO: 31161 - RNA, 22 nt, synthetic construct
  source 1..22: mol_type = other RNA
ttgggttgatactgaagaattg

SEQ ID NO: 31162 - RNA, 22 nt, synthetic construct
  source 1..22: mol_type = other RNA
ttggtaaatggtctgttttgga

SEQ ID NO: 31163 - RNA, 22 nt, synthetic construct
  source 1..22: mol_type = other RNA
ttggtacatttgtgacttgtgc

SEQ ID NO: 31164 - RNA, 22 nt, synthetic construct
  source 1..22: mol_type = other RNA
ttggtagcagtggagagctaca

SEQ ID NO: 31165 - RNA, 22 nt, synthetic construct
  source 1..22: mol_type = other RNA
ttggtccactgtaccttgggac

SEQ ID NO: 31166 - RNA, 22 nt, synthetic construct
  source 1..22: mol_type = other RNA
ttggtcttgtttcaatttcttg

SEQ ID NO: 31167 - RNA, 22 nt, synthetic construct
  source 1..22: mol_type = other RNA
ttggtcttgttttctcagaaca

SEQ ID NO: 31168 - RNA, 22 nt, synthetic construct
  source 1..22: mol_type = other RNA
ttggtgaaaacgaggggccttc

SEQ ID NO: 31169 - RNA, 22 nt, synthetic construct
  source 1..22: mol_type = other RNA
ttggtgggttatgcttgaggtg

SEQ ID NO: 31170 - RNA, 22 nt, synthetic construct
  source 1..22: mol_type = other RNA
ttggtgtctccatttacttctg

SEQ ID NO: 31171 - RNA, 22 nt, synthetic construct
  source 1..22: mol_type = other RNA
ttggtgtcttttctgaagaagt

SEQ ID NO: 31172 - RNA, 22 nt, synthetic construct
  source 1..22: mol_type = other RNA
ttggttctatcctgttccatca

SEQ ID NO: 31173 - RNA, 22 nt, synthetic construct
  source 1..22: mol_type = other RNA
ttggttgactgctttcacctgg

SEQ ID NO: 31174 - RNA, 22 nt, synthetic construct
  source 1..22: mol_type = other RNA
ttggttggggtagtggtggtgt

SEQ ID NO: 31175 - RNA, 22 nt, synthetic construct
  source 1..22: mol_type = other RNA
ttggttggtgtcttttctgaag

SEQ ID NO: 31176 - RNA, 22 nt, synthetic construct
  source 1..22: mol_type = other RNA
ttggtttctatttttatatccc

SEQ ID NO: 31177 - RNA, 22 nt, synthetic construct
  source 1..22: mol_type = other RNA
ttgtaatttttgctgctgttgc

SEQ ID NO: 31178 - RNA, 22 nt, synthetic construct
  source 1..22: mol_type = other RNA
ttgtagccagaggttctgtctg

SEQ ID NO: 31179 - RNA, 22 nt, synthetic construct
  source 1..22: mol_type = other RNA
ttgtagttgttctggtttctga

SEQ ID NO: 31180 - RNA, 22 nt, synthetic construct
  source 1..22: mol_type = other RNA
ttgtattacttaaaaacaaggc

SEQ ID NO: 31181 - RNA, 22 nt, synthetic construct
  source 1..22: mol_type = other RNA
ttgtcatggtaattagcacttt

SEQ ID NO: 31182 - RNA, 22 nt, synthetic construct
  source 1..22: mol_type = other RNA
ttgtccctgcagtctgtatgtc

SEQ ID NO: 31183 - RNA, 22 nt, synthetic construct
  source 1..22: mol_type = other RNA
ttgtcctgtagctctccactgc

SEQ ID NO: 31184 - RNA, 22 nt, synthetic construct
  source 1..22: mol_type = other RNA
ttgtcctgtgagatcactcacc

SEQ ID NO: 31185 - RNA, 22 nt, synthetic construct
  source 1..22: mol_type = other RNA
ttgtctagtcaaaactgtgact

SEQ ID NO: 31186 - RNA, 22 nt, synthetic construct
  source 1..22: mol_type = other RNA
ttgtctcgacccttcagaatct

SEQ ID NO: 31187 - RNA, 22 nt, synthetic construct
  source 1..22: mol_type = other RNA
ttgtgacttctgctcctgttct

SEQ ID NO: 31188 - RNA, 22 nt, synthetic construct
  source 1..22: mol_type = other RNA
ttgtgacttgtgctccagctgt

SEQ ID NO: 31189 - RNA, 22 nt, synthetic construct
  source 1..22: mol_type = other RNA
ttgtgatggtggtggtggtgtg

SEQ ID NO: 31190 - RNA, 22 nt, synthetic construct
  source 1..22: mol_type = other RNA
ttgtgcccccaacacagcacta

SEQ ID NO: 31191 - RNA, 22 nt, synthetic construct
  source 1..22: mol_type = other RNA
ttgtgctccagctgtgttgttt

SEQ ID NO: 31192 - RNA, 22 nt, synthetic construct
  source 1..22: mol_type = other RNA
ttgtgctgcctgtttatgaggc

SEQ ID NO: 31193 - RNA, 22 nt, synthetic construct
  source 1..22: mol_type = other RNA
ttgtggatggccccgaagcaag

SEQ ID NO: 31194 - RNA, 22 nt, synthetic construct
  source 1..22: mol_type = other RNA
ttgtggttccctggatgttatt

SEQ ID NO: 31195 - RNA, 22 nt, synthetic construct
  source 1..22: mol_type = other RNA
ttgtgtaaagtcaggactcaca

SEQ ID NO: 31196 - RNA, 22 nt, synthetic construct
  source 1..22: mol_type = other RNA
ttgtgtgaacaggaatgacata

SEQ ID NO: 31197 - RNA, 22 nt, synthetic construct
  source 1..22: mol_type = other RNA
ttgtgttactttggttggggta

SEQ ID NO: 31198 - RNA, 22 nt, synthetic construct
  source 1..22: mol_type = other RNA
ttgtgttctgagaaaacaagac

SEQ ID NO: 31199 - RNA, 22 nt, synthetic construct
  source 1..22: mol_type = other RNA
ttgtgtttccattgcggtgcag

SEQ ID NO: 31200 - RNA, 22 nt, synthetic construct
  source 1..22: mol_type = other RNA
ttgtgtttgtgctgcctgttta

SEQ ID NO: 31201 - RNA, 22 nt, synthetic construct
  source 1..22: mol_type = other RNA
ttgttcaaacaatacacaccta

SEQ ID NO: 31202 - RNA, 22 nt, synthetic construct
  source 1..22: mol_type = other RNA
ttgttctggtttctgaaaggaa

SEQ ID NO: 31203 - RNA, 22 nt, synthetic construct
  source 1..22: mol_type = other RNA
ttgttgaaaatgaaatctagtg

SEQ ID NO: 31204 - RNA, 22 nt, synthetic construct
  source 1..22: mol_type = other RNA
ttgttgaccagacatatcttgg

SEQ ID NO: 31205 - RNA, 22 nt, synthetic construct
  source 1..22: mol_type = other RNA
ttgttgctttgggggtgaggaa

SEQ ID NO: 31206 - RNA, 22 nt, synthetic construct
  source 1..22: mol_type = other RNA
ttgttgtagttgttctggtttc

SEQ ID NO: 31207 - RNA, 22 nt, synthetic construct
  source 1..22: mol_type = other RNA
ttgttgtgacttctgctcctgt

SEQ ID NO: 31208 - RNA, 22 nt, synthetic construct
  source 1..22: mol_type = other RNA
ttgttgttgtagttgttctggt

SEQ ID NO: 31209 - RNA, 22 nt, synthetic construct
  source 1..22: mol_type = other RNA
ttgtttcaatttcttgatctga

SEQ ID NO: 31210 - RNA, 22 nt, synthetic construct
  source 1..22: mol_type = other RNA
ttgtttcctgcaaaaagttcag

SEQ ID NO: 31211 - RNA, 22 nt, synthetic construct
  source 1..22: mol_type = other RNA
ttgtttctcatcaactgctggc

SEQ ID NO: 31212 - RNA, 22 nt, synthetic construct
  source 1..22: mol_type = other RNA
ttgtttgaacaagaaacctgta

SEQ ID NO: 31213 - RNA, 22 nt, synthetic construct
  source 1..22: mol_type = other RNA
ttgtttgctgctctaaagctgg

SEQ ID NO: 31214 - RNA, 22 nt, synthetic construct
  source 1..22: mol_type = other RNA
ttgtttggaggtcatttgattg

SEQ ID NO: 31215 - RNA, 22 nt, synthetic construct
  source 1..22: mol_type = other RNA
ttgttttaaataccgttcagag

SEQ ID NO: 31216 - RNA, 22 nt, synthetic construct
  source 1..22: mol_type = other RNA
ttgttttctcagaacacaatgg

SEQ ID NO: 31217 - RNA, 22 nt, synthetic construct
  source 1..22: mol_type = other RNA
ttgttttctgggtgtaagcttg

SEQ ID NO: 31218 - RNA, 22 nt, synthetic construct
  source 1..22: mol_type = other RNA
ttgttttctggtggtgctgtgt

SEQ ID NO: 31219 - RNA, 22 nt, synthetic construct
  source 1..22: mol_type = other RNA
tttaaataccgttcagagctgc

SEQ ID NO: 31220 - RNA, 22 nt, synthetic construct
  source 1..22: mol_type = other RNA
tttaactgcattttcttgggct

SEQ ID NO: 31221 - RNA, 22 nt, synthetic construct
  source 1..22: mol_type = other RNA
tttaagggaagtgaaaatagag

SEQ ID NO: 31222 - RNA, 22 nt, synthetic construct
  source 1..22: mol_type = other RNA
tttacacaagaaagtagagggt

SEQ ID NO: 31223 - RNA, 22 nt, synthetic construct
  source 1..22: mol_type = other RNA
tttaccaaaagctcatgtgcag

SEQ ID NO: 31224 - RNA, 22 nt, synthetic construct
  source 1..22: mol_type = other RNA
tttaccctctattttcacttcc

SEQ ID NO: 31225 - RNA, 22 nt, synthetic construct
  source 1..22: mol_type = other RNA
tttactggcattatcagcatca

SEQ ID NO: 31226 - RNA, 22 nt, synthetic construct
  source 1..22: mol_type = other RNA
tttacttctggatgagctctct

SEQ ID NO: 31227 - RNA, 22 nt, synthetic construct
  source 1..22: mol_type = other RNA
tttacttgcttctgtgatttga

SEQ ID NO: 31228 - RNA, 22 nt, synthetic construct
  source 1..22: mol_type = other RNA
tttagaagaacaccaccactac

SEQ ID NO: 31229 - RNA, 22 nt, synthetic construct
  source 1..22: mol_type = other RNA
tttagagcagcaaacaacttct

SEQ ID NO: 31230 - RNA, 22 nt, synthetic construct
  source 1..22: mol_type = other RNA
tttagatgggattccgcttggt

SEQ ID NO: 31231 - RNA, 22 nt, synthetic construct
  source 1..22: mol_type = other RNA
tttagcattgcagctagtttac

SEQ ID NO: 31232 - RNA, 22 nt, synthetic construct
  source 1..22: mol_type = other RNA
tttagtctggccaaagaatgat

SEQ ID NO: 31233 - RNA, 22 nt, synthetic construct
  source 1..22: mol_type = other RNA
tttatagagtcaccttccaaat

SEQ ID NO: 31234 - RNA, 22 nt, synthetic construct
  source 1..22: mol_type = other RNA
tttatatccctgtagaactgaa

SEQ ID NO: 31235 - RNA, 22 nt, synthetic construct
  source 1..22: mol_type = other RNA
tttatattctgtacttcctcca

SEQ ID NO: 31236 - RNA, 22 nt, synthetic construct
  source 1..22: mol_type = other RNA
tttatgaggcttatgttgcaaa

SEQ ID NO: 31237 - RNA, 22 nt, synthetic construct
  source 1..22: mol_type = other RNA
tttatgtgagatgtggttttct

SEQ ID NO: 31238 - RNA, 22 nt, synthetic construct
  source 1..22: mol_type = other RNA
tttattcctccattttgcaaac

SEQ ID NO: 31239 - RNA, 22 nt, synthetic construct
  source 1..22: mol_type = other RNA
tttattctctgaaactaggtgt

SEQ ID NO: 31240 - RNA, 22 nt, synthetic construct
  source 1..22: mol_type = other RNA
tttattggatacacctgtcaag

SEQ ID NO: 31241 - RNA, 22 nt, synthetic construct
  source 1..22: mol_type = other RNA
tttcaaactcacaccttttgca

SEQ ID NO: 31242 - RNA, 22 nt, synthetic construct
  source 1..22: mol_type = other RNA
tttcaacaaagagcagattccc

SEQ ID NO: 31243 - RNA, 22 nt, synthetic construct
  source 1..22: mol_type = other RNA
tttcaacacataactgcagtgg

SEQ ID NO: 31244 - RNA, 22 nt, synthetic construct
  source 1..22: mol_type = other RNA
tttcaacactggggacataagt

SEQ ID NO: 31245 - RNA, 22 nt, synthetic construct
  source 1..22: mol_type = other RNA
tttcaacttggtacatttgtga

SEQ ID NO: 31246 - RNA, 22 nt, synthetic construct
  source 1..22: mol_type = other RNA
tttcaacttttacttgcttctg

SEQ ID NO: 31247 - RNA, 22 nt, synthetic construct
  source 1..22: mol_type = other RNA
tttcaagaacaggagcagaagt

SEQ ID NO: 31248 - RNA, 22 nt, synthetic construct
  source 1..22: mol_type = other RNA
tttcaatttcttgatctgaagg

SEQ ID NO: 31249 - RNA, 22 nt, synthetic construct
  source 1..22: mol_type = other RNA
tttcaccaagcggaatcccatc

SEQ ID NO: 31250 - RNA, 22 nt, synthetic construct
  source 1..22: mol_type = other RNA
tttcaccagtttttcaacacat

SEQ ID NO: 31251 - RNA, 22 nt, synthetic construct
  source 1..22: mol_type = other RNA
tttcaccatgaaaacattcttc

SEQ ID NO: 31252 - RNA, 22 nt, synthetic construct
  source 1..22: mol_type = other RNA
tttcacctggatttctttcttg

SEQ ID NO: 31253 - RNA, 22 nt, synthetic construct
  source 1..22: mol_type = other RNA
tttcacgccaagtcgttatttg

SEQ ID NO: 31254 - RNA, 22 nt, synthetic construct
  source 1..22: mol_type = other RNA
tttcacttcccttaaaagtgtt

SEQ ID NO: 31255 - RNA, 22 nt, synthetic construct
  source 1..22: mol_type = other RNA
tttcagaaaccagaacaactac

SEQ ID NO: 31256 - RNA, 22 nt, synthetic construct
  source 1..22: mol_type = other RNA
tttcagaaagcatcggagaagg

SEQ ID NO: 31257 - RNA, 22 nt, synthetic construct
  source 1..22: mol_type = other RNA
tttcagagaataaagaacagac

SEQ ID NO: 31258 - RNA, 22 nt, synthetic construct
  source 1..22: mol_type = other RNA
tttcagatagtgctgtgttggg

SEQ ID NO: 31259 - RNA, 22 nt, synthetic construct
  source 1..22: mol_type = other RNA
tttcaggcccactgcagttatg

SEQ ID NO: 31260 - RNA, 22 nt, synthetic construct
  source 1..22: mol_type = other RNA
tttcagtttgggaatctgctct

SEQ ID NO: 31261 - RNA, 22 nt, synthetic construct
  source 1..22: mol_type = other RNA
tttcatggtctgactataaggg

SEQ ID NO: 31262 - RNA, 22 nt, synthetic construct
  source 1..22: mol_type = other RNA
tttcatggtgaaaatcagtatt

SEQ ID NO: 31263 - RNA, 22 nt, synthetic construct
  source 1..22: mol_type = other RNA
tttcattttcaacaaagagcag

SEQ ID NO: 31264 - RNA, 22 nt, synthetic construct
  source 1..22: mol_type = other RNA
tttccaaataatgtgatcccaa

SEQ ID NO: 31265 - RNA, 22 nt, synthetic construct
  source 1..22: mol_type = other RNA
tttccaggagttcaccatgtgt

SEQ ID NO: 31266 - RNA, 22 nt, synthetic construct
  source 1..22: mol_type = other RNA
tttccagtgtattgtttggagg

SEQ ID NO: 31267 - RNA, 22 nt, synthetic construct
  source 1..22: mol_type = other RNA
tttccatgttttgttttctggt

SEQ ID NO: 31268 - RNA, 22 nt, synthetic construct
  source 1..22: mol_type = other RNA
tttccattgcggtgcagaaaac

SEQ ID NO: 31269 - RNA, 22 nt, synthetic construct
  source 1..22: mol_type = other RNA
tttcccatcttgcagatgtgta

SEQ ID NO: 31270 - RNA, 22 nt, synthetic construct
  source 1..22: mol_type = other RNA
tttcccctcctgctcattcaga

SEQ ID NO: 31271 - RNA, 22 nt, synthetic construct
  source 1..22: mol_type = other RNA
tttcctcacccccaaagcaaca

SEQ ID NO: 31272 - RNA, 22 nt, synthetic construct
  source 1..22: mol_type = other RNA
tttcctgcaaaaagttcaggat

SEQ ID NO: 31273 - RNA, 22 nt, synthetic construct
  source 1..22: mol_type = other RNA
tttcctgtgcctgaccagggag

SEQ ID NO: 31274 - RNA, 22 nt, synthetic construct
  source 1..22: mol_type = other RNA
tttccttctgaaggaagctgag

SEQ ID NO: 31275 - RNA, 22 nt, synthetic construct
  source 1..22: mol_type = other RNA
tttctcagaacacaatggaaca

SEQ ID NO: 31276 - RNA, 22 nt, synthetic construct
  source 1..22: mol_type = other RNA
tttctcatcaactgctggcagt

SEQ ID NO: 31277 - RNA, 22 nt, synthetic construct
  source 1..22: mol_type = other RNA
tttctccattagccttttggtc

SEQ ID NO: 31278 - RNA, 22 nt, synthetic construct
  source 1..22: mol_type = other RNA
tttctccccctcctcctcttcc

SEQ ID NO: 31279 - RNA, 22 nt, synthetic construct
  source 1..22: mol_type = other RNA
tttctgaaaggaacaggtattt

SEQ ID NO: 31280 - RNA, 22 nt, synthetic construct
  source 1..22: mol_type = other RNA
tttctgaaaggcctcagaataa

SEQ ID NO: 31281 - RNA, 22 nt, synthetic construct
  source 1..22: mol_type = other RNA
tttctgaagaagttgtttgctg

SEQ ID NO: 31282 - RNA, 22 nt, synthetic construct
  source 1..22: mol_type = other RNA
tttctgcaccgcaatggaaaca

SEQ ID NO: 31283 - RNA, 22 nt, synthetic construct
  source 1..22: mol_type = other RNA
tttctgcaggagatgggcatat

SEQ ID NO: 31284 - RNA, 22 nt, synthetic construct
  source 1..22: mol_type = other RNA
tttctgccactaccacaccacc

SEQ ID NO: 31285 - RNA, 22 nt, synthetic construct
  source 1..22: mol_type = other RNA
tttctgcctcttccgtggaaca

SEQ ID NO: 31286 - RNA, 22 nt, synthetic construct
  source 1..22: mol_type = other RNA
tttctggcacttacctacacat

SEQ ID NO: 31287 - RNA, 22 nt, synthetic construct
  source 1..22: mol_type = other RNA
tttctgggtgtaagcttgcctt

SEQ ID NO: 31288 - RNA, 22 nt, synthetic construct
  source 1..22: mol_type = other RNA
tttctggtggtgctgtgtgcat

SEQ ID NO: 31289 - RNA, 22 nt, synthetic construct
  source 1..22: mol_type = other RNA
tttcttatcactcaaatcggag

SEQ ID NO: 31290 - RNA, 22 nt, synthetic construct
  source 1..22: mol_type = other RNA
tttcttgatctgaaggagccca

SEQ ID NO: 31291 - RNA, 22 nt, synthetic construct
  source 1..22: mol_type = other RNA
tttcttggcttaccccgaagtt

SEQ ID NO: 31292 - RNA, 22 nt, synthetic construct
  source 1..22: mol_type = other RNA
tttcttgggctacagaactcac

SEQ ID NO: 31293 - RNA, 22 nt, synthetic construct
  source 1..22: mol_type = other RNA
tttcttgtgtaaagtcaggact

SEQ ID NO: 31294 - RNA, 22 nt, synthetic construct
  source 1..22: mol_type = other RNA
tttcttgttcaaacaatacaca

SEQ ID NO: 31295 - RNA, 22 nt, synthetic construct
  source 1..22: mol_type = other RNA
tttctttcttggcttaccccga

SEQ ID NO: 31296 - RNA, 22 nt, synthetic construct
  source 1..22: mol_type = other RNA
tttgaaaatggctcagtctctg

SEQ ID NO: 31297 - RNA, 22 nt, synthetic construct
  source 1..22: mol_type = other RNA
tttgaaagagtgccacttggtg

SEQ ID NO: 31298 - RNA, 22 nt, synthetic construct
  source 1..22: mol_type = other RNA
tttgaacaagaaacctgtattt

SEQ ID NO: 31299 - RNA, 22 nt, synthetic construct
  source 1..22: mol_type = other RNA
tttgaatactgattttcaccat

SEQ ID NO: 31300 - RNA, 22 nt, synthetic construct
  source 1..22: mol_type = other RNA
tttgaccataaggctcttactc

SEQ ID NO: 31301 - RNA, 22 nt, synthetic construct
  source 1..22: mol_type = other RNA
tttgactagacaaaccactgct

SEQ ID NO: 31302 - RNA, 22 nt, synthetic construct
  source 1..22: mol_type = other RNA
tttgagagtaagagccttatgg

SEQ ID NO: 31303 - RNA, 22 nt, synthetic construct
  source 1..22: mol_type = other RNA
tttgagatatgcccatctcctg

SEQ ID NO: 31304 - RNA, 22 nt, synthetic construct
  source 1..22: mol_type = other RNA
tttgagggagatgtgaactctg

SEQ ID NO: 31305 - RNA, 22 nt, synthetic construct
  source 1..22: mol_type = other RNA
tttgagtgataagaaagaatct

SEQ ID NO: 31306 - RNA, 22 nt, synthetic construct
  source 1..22: mol_type = other RNA
tttgagtgtccttctggggagg

SEQ ID NO: 31307 - RNA, 22 nt, synthetic construct
  source 1..22: mol_type = other RNA
tttgattggagagattgggttg

SEQ ID NO: 31308 - RNA, 22 nt, synthetic construct
  source 1..22: mol_type = other RNA
tttgcaaaatggaggaataaaa

SEQ ID NO: 31309 - RNA, 22 nt, synthetic construct
  source 1..22: mol_type = other RNA
tttgcaaacacttggaataccc

SEQ ID NO: 31310 - RNA, 22 nt, synthetic construct
  source 1..22: mol_type = other RNA
tttgcaacataagcctcataaa

SEQ ID NO: 31311 - RNA, 22 nt, synthetic construct
  source 1..22: mol_type = other RNA
tttgcaagctcctggtggcagc

SEQ ID NO: 31312 - RNA, 22 nt, synthetic construct
  source 1..22: mol_type = other RNA
tttgcaggaaacaagacccaaa

SEQ ID NO: 31313 - RNA, 22 nt, synthetic construct
  source 1..22: mol_type = other RNA
tttgcatgcacttgatttcatg

SEQ ID NO: 31314 - RNA, 22 nt, synthetic construct
  source 1..22: mol_type = other RNA
tttgcatggttatgtatcaagt

SEQ ID NO: 31315 - RNA, 22 nt, synthetic construct
  source 1..22: mol_type = other RNA
tttgccagacagaacctctggc

SEQ ID NO: 31316 - RNA, 22 nt, synthetic construct
  source 1..22: mol_type = other RNA
tttgctccttgtctcgaccctt

SEQ ID NO: 31317 - RNA, 22 nt, synthetic construct
  source 1..22: mol_type = other RNA
tttgctgagcaagttgcgcagc

SEQ ID NO: 31318 - RNA, 22 nt, synthetic construct
  source 1..22: mol_type = other RNA
tttgctgatcattgttgctttg

SEQ ID NO: 31319 - RNA, 22 nt, synthetic construct
  source 1..22: mol_type = other RNA
tttgctgcacattatcacagct

SEQ ID NO: 31320 - RNA, 22 nt, synthetic construct
  source 1..22: mol_type = other RNA
tttgctgctctaaagctggggt

SEQ ID NO: 31321 - RNA, 22 nt, synthetic construct
  source 1..22: mol_type = other RNA
tttgctgctgttcttgcttctg

SEQ ID NO: 31322 - RNA, 22 nt, synthetic construct
  source 1..22: mol_type = other RNA
tttgctgctgttgctggttttg

SEQ ID NO: 31323 - RNA, 22 nt, synthetic construct
  source 1..22: mol_type = other RNA
tttgcttgaagtaagcaccatt

SEQ ID NO: 31324 - RNA, 22 nt, synthetic construct
  source 1..22: mol_type = other RNA
tttggaaaatattgcatgtgat

SEQ ID NO: 31325 - RNA, 22 nt, synthetic construct
  source 1..22: mol_type = other RNA
tttggaactggagatgttggtc

SEQ ID NO: 31326 - RNA, 22 nt, synthetic construct
  source 1..22: mol_type = other RNA
tttggaaggtgactctataaaa

SEQ ID NO: 31327 - RNA, 22 nt, synthetic construct
  source 1..22: mol_type = other RNA
tttggacattatgagtctcgaa

SEQ ID NO: 31328 - RNA, 22 nt, synthetic construct
  source 1..22: mol_type = other RNA
tttggagaagtgcacctggtgt

SEQ ID NO: 31329 - RNA, 22 nt, synthetic construct
  source 1..22: mol_type = other RNA
tttggaggcagctcagagttag

SEQ ID NO: 31330 - RNA, 22 nt, synthetic construct
  source 1..22: mol_type = other RNA
tttggaggtcatttgattggag

SEQ ID NO: 31331 - RNA, 22 nt, synthetic construct
  source 1..22: mol_type = other RNA
tttggccagactaaagtggaag

SEQ ID NO: 31332 - RNA, 22 nt, synthetic construct
  source 1..22: mol_type = other RNA
tttgggaatctgctctttgttg

SEQ ID NO: 31333 - RNA, 22 nt, synthetic construct
  source 1..22: mol_type = other RNA
tttgggatcacattatttggaa

SEQ ID NO: 31334 - RNA, 22 nt, synthetic construct
  source 1..22: mol_type = other RNA
tttgggggtgaggaaaagtctg

SEQ ID NO: 31335 - RNA, 22 nt, synthetic construct
  source 1..22: mol_type = other RNA
tttggggttgctgtgtttgctg

SEQ ID NO: 31336 - RNA, 22 nt, synthetic construct
  source 1..22: mol_type = other RNA
tttgggtcttgtttcctgcaaa

SEQ ID NO: 31337 - RNA, 22 nt, synthetic construct
  source 1..22: mol_type = other RNA
tttggtaaatggtctgttttgg

SEQ ID NO: 31338 - RNA, 22 nt, synthetic construct
  source 1..22: mol_type = other RNA
tttggtagcagtggagagctac

SEQ ID NO: 31339 - RNA, 22 nt, synthetic construct
  source 1..22: mol_type = other RNA
tttggtcttgtttcaatttctt

SEQ ID NO: 31340 - RNA, 22 nt, synthetic construct
  source 1..22: mol_type = other RNA
tttggttgactgctttcacctg

SEQ ID NO: 31341 - RNA, 22 nt, synthetic construct
  source 1..22: mol_type = other RNA
tttggttggggtagtggtggtg

SEQ ID NO: 31342 - RNA, 22 nt, synthetic construct
  source 1..22: mol_type = other RNA
tttggttggtgtcttttctgaa

SEQ ID NO: 31343 - RNA, 22 nt, synthetic construct
  source 1..22: mol_type = other RNA
tttgtaatttttgctgctgttg

SEQ ID NO: 31344 - RNA, 22 nt, synthetic construct
  source 1..22: mol_type = other RNA
tttgtagccagaggttctgtct

SEQ ID NO: 31345 - RNA, 22 nt, synthetic construct
  source 1..22: mol_type = other RNA
tttgtctagtcaaaactgtgac

SEQ ID NO: 31346 - RNA, 22 nt, synthetic construct
  source 1..22: mol_type = other RNA
tttgtgacttgtgctccagctg

SEQ ID NO: 31347 - RNA, 22 nt, synthetic construct
  source 1..22: mol_type = other RNA
tttgtgctgcctgtttatgagg

SEQ ID NO: 31348 - RNA, 22 nt, synthetic construct
  source 1..22: mol_type = other RNA
tttgtggttccctggatgttat

SEQ ID NO: 31349 - RNA, 22 nt, synthetic construct
  source 1..22: mol_type = other RNA
tttgttgttgtagttgttctgg

SEQ ID NO: 31350 - RNA, 22 nt, synthetic construct
  source 1..22: mol_type = other RNA
tttgtttctcatcaactgctgg

SEQ ID NO: 31351 - RNA, 22 nt, synthetic construct
  source 1..22: mol_type = other RNA
tttgttttaaataccgttcaga

SEQ ID NO: 31352 - RNA, 22 nt, synthetic construct
  source 1..22: mol_type = other RNA
tttgttttctggtggtgctgtg

SEQ ID NO: 31353 - RNA, 22 nt, synthetic construct
  source 1..22: mol_type = other RNA
ttttaaataccgttcagagctg

SEQ ID NO: 31354 - RNA, 22 nt, synthetic construct
  source 1..22: mol_type = other RNA
ttttaagggaagtgaaaataga

SEQ ID NO: 31355 - RNA, 22 nt, synthetic construct
  source 1..22: mol_type = other RNA
ttttacttgcttctgtgatttg

SEQ ID NO: 31356 - RNA, 22 nt, synthetic construct
  source 1..22: mol_type = other RNA
ttttagaagaacaccaccacta

SEQ ID NO: 31357 - RNA, 22 nt, synthetic construct
  source 1..22: mol_type = other RNA
ttttagatgggattccgcttgg

SEQ ID NO: 31358 - RNA, 22 nt, synthetic construct
  source 1..22: mol_type = other RNA
ttttatagagtcaccttccaaa

SEQ ID NO: 31359 - RNA, 22 nt, synthetic construct
  source 1..22: mol_type = other RNA
ttttatatccctgtagaactga

SEQ ID NO: 31360 - RNA, 22 nt, synthetic construct
  source 1..22: mol_type = other RNA
ttttattcctccattttgcaaa

SEQ ID NO: 31361 - RNA, 22 nt, synthetic construct
  source 1..22: mol_type = other RNA
ttttcaaactcacaccttttgc

SEQ ID NO: 31362 - RNA, 22 nt, synthetic construct
  source 1..22: mol_type = other RNA
ttttcaacaaagagcagattcc

SEQ ID NO: 31363 - RNA, 22 nt, synthetic construct
  source 1..22: mol_type = other RNA
ttttcaacacataactgcagtg

SEQ ID NO: 31364 - RNA, 22 nt, synthetic construct
  source 1..22: mol_type = other RNA
ttttcaccaagcggaatcccat

SEQ ID NO: 31365 - RNA, 22 nt, synthetic construct
  source 1..22: mol_type = other RNA
ttttcaccatgaaaacattctt

SEQ ID NO: 31366 - RNA, 22 nt, synthetic construct
  source 1..22: mol_type = other RNA
ttttcacttcccttaaaagtgt

SEQ ID NO: 31367 - RNA, 22 nt, synthetic construct
  source 1..22: mol_type = other RNA
ttttcaggcccactgcagttat

SEQ ID NO: 31368 - RNA, 22 nt, synthetic construct
  source 1..22: mol_type = other RNA
ttttcagtttgggaatctgctc

SEQ ID NO: 31369 - RNA, 22 nt, synthetic construct
  source 1..22: mol_type = other RNA
ttttcatggtgaaaatcagtat

SEQ ID NO: 31370 - RNA, 22 nt, synthetic construct
  source 1..22: mol_type = other RNA
ttttccaaataatgtgatccca

SEQ ID NO: 31371 - RNA, 22 nt, synthetic construct
  source 1..22: mol_type = other RNA
ttttccaggagttcaccatgtg

SEQ ID NO: 31372 - RNA, 22 nt, synthetic construct
  source 1..22: mol_type = other RNA
ttttccatgttttgttttctgg

SEQ ID NO: 31373 - RNA, 22 nt, synthetic construct
  source 1..22: mol_type = other RNA
ttttcccctcctgctcattcag

SEQ ID NO: 31374 - RNA, 22 nt, synthetic construct
  source 1..22: mol_type = other RNA
ttttcctcacccccaaagcaac

SEQ ID NO: 31375 - RNA, 22 nt, synthetic construct
  source 1..22: mol_type = other RNA
ttttcctgtgcctgaccaggga

SEQ ID NO: 31376 - RNA, 22 nt, synthetic construct
  source 1..22: mol_type = other RNA
ttttccttctgaaggaagctga

SEQ ID NO: 31377 - RNA, 22 nt, synthetic construct
  source 1..22: mol_type = other RNA
ttttctcagaacacaatggaac

SEQ ID NO: 31378 - RNA, 22 nt, synthetic construct
  source 1..22: mol_type = other RNA
ttttctgaagaagttgtttgct

SEQ ID NO: 31379 - RNA, 22 nt, synthetic construct
  source 1..22: mol_type = other RNA
ttttctgcaccgcaatggaaac

SEQ ID NO: 31380 - RNA, 22 nt, synthetic construct
  source 1..22: mol_type = other RNA
ttttctgcaggagatgggcata

SEQ ID NO: 31381 - RNA, 22 nt, synthetic construct
  source 1..22: mol_type = other RNA
ttttctgccactaccacaccac

SEQ ID NO: 31382 - RNA, 22 nt, synthetic construct
  source 1..22: mol_type = other RNA
ttttctgggtgtaagcttgcct

SEQ ID NO: 31383 - RNA, 22 nt, synthetic construct
  source 1..22: mol_type = other RNA
ttttctggtggtgctgtgtgca

SEQ ID NO: 31384 - RNA, 22 nt, synthetic construct
  source 1..22: mol_type = other RNA
ttttcttgggctacagaactca

SEQ ID NO: 31385 - RNA, 22 nt, synthetic construct
  source 1..22: mol_type = other RNA
ttttgaaagagtgccacttggt

SEQ ID NO: 31386 - RNA, 22 nt, synthetic construct
  source 1..22: mol_type = other RNA
ttttgaatactgattttcacca

SEQ ID NO: 31387 - RNA, 22 nt, synthetic construct
  source 1..22: mol_type = other RNA
ttttgactagacaaaccactgc

SEQ ID NO: 31388 - RNA, 22 nt, synthetic construct
  source 1..22: mol_type = other RNA
ttttgagatatgcccatctcct

SEQ ID NO: 31389 - RNA, 22 nt, synthetic construct
  source 1..22: mol_type = other RNA
ttttgagggagatgtgaactct

SEQ ID NO: 31390 - RNA, 22 nt, synthetic construct
  source 1..22: mol_type = other RNA
ttttgagtgtccttctggggag

SEQ ID NO: 31391 - RNA, 22 nt, synthetic construct
  source 1..22: mol_type = other RNA
ttttgcaaacacttggaatacc

SEQ ID NO: 31392 - RNA, 22 nt, synthetic construct
  source 1..22: mol_type = other RNA
ttttgcaacataagcctcataa

SEQ ID NO: 31393 - RNA, 22 nt, synthetic construct
  source 1..22: mol_type = other RNA
ttttgcaggaaacaagacccaa

SEQ ID NO: 31394 - RNA, 22 nt, synthetic construct
  source 1..22: mol_type = other RNA
ttttgcatgcacttgatttcat

SEQ ID NO: 31395 - RNA, 22 nt, synthetic construct
  source 1..22: mol_type = other RNA
ttttgctgcacattatcacagc

SEQ ID NO: 31396 - RNA, 22 nt, synthetic construct
  source 1..22: mol_type = other RNA
ttttgctgctgttgctggtttt

SEQ ID NO: 31397 - RNA, 22 nt, synthetic construct
  source 1..22: mol_type = other RNA
ttttggaactggagatgttggt

SEQ ID NO: 31398 - RNA, 22 nt, synthetic construct
  source 1..22: mol_type = other RNA
ttttggagaagtgcacctggtg

SEQ ID NO: 31399 - RNA, 22 nt, synthetic construct
  source 1..22: mol_type = other RNA
ttttgggtcttgtttcctgcaa

SEQ ID NO: 31400 - RNA, 22 nt, synthetic construct
  source 1..22: mol_type = other RNA
ttttggtaaatggtctgttttg

SEQ ID NO: 31401 - RNA, 22 nt, synthetic construct
  source 1..22: mol_type = other RNA
ttttggtagcagtggagagcta

SEQ ID NO: 31402 - RNA, 22 nt, synthetic construct
  source 1..22: mol_type = other RNA
ttttggtcttgtttcaatttct

SEQ ID NO: 31403 - RNA, 22 nt, synthetic construct
  source 1..22: mol_type = other RNA
ttttggttggtgtcttttctga

SEQ ID NO: 31404 - RNA, 22 nt, synthetic construct
  source 1..22: mol_type = other RNA
ttttgttgttgtagttgttctg

SEQ ID NO: 31405 - RNA, 22 nt, synthetic construct
  source 1..22: mol_type = other RNA
ttttgttttaaataccgttcag

SEQ ID NO: 31406 - RNA, 22 nt, synthetic construct
  source 1..22: mol_type = other RNA
ttttgttttctggtggtgctgt

SEQ ID NO: 31407 - RNA, 22 nt, synthetic construct
  source 1..22: mol_type = other RNA
tttttatatccctgtagaactg

SEQ ID NO: 31408 - RNA, 22 nt, synthetic construct
  source 1..22: mol_type = other RNA
tttttcaacacataactgcagt

SEQ ID NO: 31409 - RNA, 22 nt, synthetic construct
  source 1..22: mol_type = other RNA
tttttcagtttgggaatctgct

SEQ ID NO: 31410 - RNA, 22 nt, synthetic construct
  source 1..22: mol_type = other RNA
tttttccaggagttcaccatgt

SEQ ID NO: 31411 - RNA, 22 nt, synthetic construct
  source 1..22: mol_type = other RNA
tttttccatgttttgttttctg

SEQ ID NO: 31412 - RNA, 22 nt, synthetic construct
  source 1..22: mol_type = other RNA
tttttcctgtgcctgaccaggg

SEQ ID NO: 31413 - RNA, 22 nt, synthetic construct
  source 1..22: mol_type = other RNA
tttttccttctgaaggaagctg

SEQ ID NO: 31414 - RNA, 22 nt, synthetic construct
  source 1..22: mol_type = other RNA
tttttgagatatgcccatctcc

SEQ ID NO: 31415 - RNA, 22 nt, synthetic construct
  source 1..22: mol_type = other RNA
tttttgcaggaaacaagaccca

SEQ ID NO: 31416 - RNA, 22 nt, synthetic construct
  source 1..22: mol_type = other RNA
tttttgctgctgttgctggttt

SEQ ID NO: 31417 - RNA, 22 nt, synthetic construct
  source 1..22: mol_type = other RNA
tttttggaactggagatgttgg

SEQ ID NO: 31418 - RNA, 22 nt, synthetic construct
  source 1..22: mol_type = other RNA
tttttggtagcagtggagagct

SEQ ID NO: 31419 - RNA, 22 nt, synthetic construct
  source 1..22: mol_type = other RNA
tttttgttgttgtagttgttct

SEQ ID NO: 31420 - RNA, 22 nt, synthetic construct
  source 1..22: mol_type = other RNA
ttttttccaggagttcaccatg

SEQ ID NO: 31421 - RNA, 20 nt, synthetic construct
  source 1..20: mol_type = other RNA
aaaaagatgaaggtcctttt

SEQ ID NO: 31422 - RNA, 20 nt, synthetic construct
  source 1..20: mol_type = other RNA
aaaaaggaccttcatctttt

SEQ ID NO: 31423 - RNA, 20 nt, synthetic construct
  source 1..20: mol_type = other RNA
aaaagatgaaggtccttttt

SEQ ID NO: 31424 - RNA, 20 nt, synthetic construct
  source 1..20: mol_type = other RNA
aaaaggaccttcatcttttt

SEQ ID NO: 31425 - RNA, 20 nt, synthetic construct
  source 1..20: mol_type = other RNA
aaacgttaatctgccctgtg

SEQ ID NO: 31426 - RNA, 20 nt, synthetic construct
  source 1..20: mol_type = other RNA
aaagatgaaggtccttttta

SEQ ID NO: 31427 - RNA, 20 nt, synthetic construct
  source 1..20: mol_type = other RNA
aaaggaccttcatctttttc

SEQ ID NO: 31428 - RNA, 20 nt, synthetic construct
  source 1..20: mol_type = other RNA
aaaggtaattaacgcaaagg

SEQ ID NO: 31429 - RNA, 20 nt, synthetic construct
  source 1..20: mol_type = other RNA
aaatcatggaagaaaggtaa

SEQ ID NO: 31430 - RNA, 20 nt, synthetic construct
  source 1..20: mol_type = other RNA
aacagagcaaattattgaaa

SEQ ID NO: 31431 - RNA, 20 nt, synthetic construct
  source 1..20: mol_type = other RNA
aacgcaaaggcacagggcag

SEQ ID NO: 31432 - RNA, 20 nt, synthetic construct
  source 1..20: mol_type = other RNA
aacgttaatctgccctgtgc

SEQ ID NO: 31433 - RNA, 20 nt, synthetic construct
  source 1..20: mol_type = other RNA
aagaaaggtaattaacgcaa

SEQ ID NO: 31434 - RNA, 20 nt, synthetic construct
  source 1..20: mol_type = other RNA
aagatgaaggtcctttttat

SEQ ID NO: 31435 - RNA, 20 nt, synthetic construct
  source 1..20: mol_type = other RNA
aaggaccttcatctttttca

SEQ ID NO: 31436 - RNA, 20 nt, synthetic construct
  source 1..20: mol_type = other RNA
aaggtaattaacgcaaaggc

SEQ ID NO: 31437 - RNA, 20 nt, synthetic construct
  source 1..20: mol_type = other RNA
aaggtcctttttatacccat

SEQ ID NO: 31438 - RNA, 20 nt, synthetic construct
  source 1..20: mol_type = other RNA
aataatttgctctgttgaga

SEQ ID NO: 31439 - RNA, 20 nt, synthetic construct
  source 1..20: mol_type = other RNA
aatagctgccacattaggac

SEQ ID NO: 31440 - RNA, 20 nt, synthetic construct
  source 1..20: mol_type = other RNA
aatcatggaagaaaggtaat

SEQ ID NO: 31441 - RNA, 20 nt, synthetic construct
  source 1..20: mol_type = other RNA
aatctgccctgtgcctttgc

SEQ ID NO: 31442 - RNA, 20 nt, synthetic construct
  source 1..20: mol_type = other RNA
aatcttctattatctcaaca

SEQ ID NO: 31443 - RNA, 20 nt, synthetic construct
  source 1..20: mol_type = other RNA
aatgtggcagctattagaga

SEQ ID NO: 31444 - RNA, 20 nt, synthetic construct
  source 1..20: mol_type = other RNA
aattaacgcaaaggcacagg

SEQ ID NO: 31445 - RNA, 20 nt, synthetic construct
  source 1..20: mol_type = other RNA
aattacctttcttccatgat

SEQ ID NO: 31446 - RNA, 20 nt, synthetic construct
  source 1..20: mol_type = other RNA
aatttgctctgttgagataa

SEQ ID NO: 31447 - RNA, 20 nt, synthetic construct
  source 1..20: mol_type = other RNA
acagagcaaattattgaaaa

SEQ ID NO: 31448 - RNA, 20 nt, synthetic construct
  source 1..20: mol_type = other RNA
acattaggacctgctcctag

SEQ ID NO: 31449 - RNA, 20 nt, synthetic construct
  source 1..20: mol_type = other RNA
acccatctaggagcaggtcc

SEQ ID NO: 31450 - RNA, 20 nt, synthetic construct
  source 1..20: mol_type = other RNA
acctgctcctagatgggtat

SEQ ID NO: 31451 - RNA, 20 nt, synthetic construct
  source 1..20: mol_type = other RNA
accttcatctttttcaataa

SEQ ID NO: 31452 - RNA, 20 nt, synthetic construct
  source 1..20: mol_type = other RNA
acctttcttccatgatttct

SEQ ID NO: 31453 - RNA, 20 nt, synthetic construct
  source 1..20: mol_type = other RNA
acgcaaaggcacagggcaga

SEQ ID NO: 31454 - RNA, 20 nt, synthetic construct
  source 1..20: mol_type = other RNA
acgttaatctgccctgtgcc

SEQ ID NO: 31455 - RNA, 20 nt, synthetic construct
  source 1..20: mol_type = other RNA
agaaaggtaattaacgcaaa

SEQ ID NO: 31456 - RNA, 20 nt, synthetic construct
  source 1..20: mol_type = other RNA
agaaatcatggaagaaaggt

SEQ ID NO: 31457 - RNA, 20 nt, synthetic construct
  source 1..20: mol_type = other RNA
agagaaatcatggaagaaag

SEQ ID NO: 31458 - RNA, 20 nt, synthetic construct
  source 1..20: mol_type = other RNA
agagcaaattattgaaaaag

SEQ ID NO: 31459 - RNA, 20 nt, synthetic construct
  source 1..20: mol_type = other RNA
agatgaaggtcctttttata

SEQ ID NO: 31460 - RNA, 20 nt, synthetic construct
  source 1..20: mol_type = other RNA
agatgggtataaaaaggacc

SEQ ID NO: 31461 - RNA, 20 nt, synthetic construct
  source 1..20: mol_type = other RNA
agcaggtcctaatgtggcag

SEQ ID NO: 31462 - RNA, 20 nt, synthetic construct
  source 1..20: mol_type = other RNA
agctattagagaaatcatgg

SEQ ID NO: 31463 - RNA, 20 nt, synthetic construct
  source 1..20: mol_type = other RNA
agctgccacattaggacctg

SEQ ID NO: 31464 - RNA, 20 nt, synthetic construct
  source 1..20: mol_type = other RNA
aggacctgctcctagatggg

SEQ ID NO: 31465 - RNA, 20 nt, synthetic construct
  source 1..20: mol_type = other RNA
aggaccttcatctttttcaa

SEQ ID NO: 31466 - RNA, 20 nt, synthetic construct
  source 1..20: mol_type = other RNA
aggagcaggtcctaatgtgg

SEQ ID NO: 31467 - RNA, 20 nt, synthetic construct
  source 1..20: mol_type = other RNA
aggtaattaacgcaaaggca

SEQ ID NO: 31468 - RNA, 20 nt, synthetic construct
  source 1..20: mol_type = other RNA
aggtcctaatgtggcagcta

SEQ ID NO: 31469 - RNA, 20 nt, synthetic construct
  source 1..20: mol_type = other RNA
aggtcctttttatacccatc

SEQ ID NO: 31470 - RNA, 20 nt, synthetic construct
  source 1..20: mol_type = other RNA
ataaaaaggaccttcatctt

SEQ ID NO: 31471 - RNA, 20 nt, synthetic construct
  source 1..20: mol_type = other RNA
ataaacgttaatctgccctg

SEQ ID NO: 31472 - RNA, 20 nt, synthetic construct
  source 1..20: mol_type = other RNA
ataatttgctctgttgagat

SEQ ID NO: 31473 - RNA, 20 nt, synthetic construct
  source 1..20: mol_type = other RNA
atacccatctaggagcaggt

SEQ ID NO: 31474 - RNA, 20 nt, synthetic construct
  source 1..20: mol_type = other RNA
atagctgccacattaggacc

SEQ ID NO: 31475 - RNA, 20 nt, synthetic construct
  source 1..20: mol_type = other RNA
atcatggaagaaaggtaatt

SEQ ID NO: 31476 - RNA, 20 nt, synthetic construct
  source 1..20: mol_type = other RNA
atctaggagcaggtcctaat

SEQ ID NO: 31477 - RNA, 20 nt, synthetic construct
  source 1..20: mol_type = other RNA
atctcaacagagcaaattat

SEQ ID NO: 31478 - RNA, 20 nt, synthetic construct
  source 1..20: mol_type = other RNA
atctgccctgtgcctttgcg

SEQ ID NO: 31479 - RNA, 20 nt, synthetic construct
  source 1..20: mol_type = other RNA
atcttctattatctcaacag

SEQ ID NO: 31480 - RNA, 20 nt, synthetic construct
  source 1..20: mol_type = other RNA
atgaaggtcctttttatacc

SEQ ID NO: 31481 - RNA, 20 nt, synthetic construct
  source 1..20: mol_type = other RNA
atgatttctctaatagctgc

SEQ ID NO: 31482 - RNA, 20 nt, synthetic construct
  source 1..20: mol_type = other RNA
atggaagaaaggtaattaac

SEQ ID NO: 31483 - RNA, 20 nt, synthetic construct
  source 1..20: mol_type = other RNA
atgggtataaaaaggacctt

SEQ ID NO: 31484 - RNA, 20 nt, synthetic construct
  source 1..20: mol_type = other RNA
atgtggcagctattagagaa

SEQ ID NO: 31485 - RNA, 20 nt, synthetic construct
  source 1..20: mol_type = other RNA
attaacgcaaaggcacaggg

SEQ ID NO: 31486 - RNA, 20 nt, synthetic construct
  source 1..20: mol_type = other RNA
attacctttcttccatgatt

SEQ ID NO: 31487 - RNA, 20 nt, synthetic construct
  source 1..20: mol_type = other RNA
attagagaaatcatggaaga

SEQ ID NO: 31488 - RNA, 20 nt, synthetic construct
  source 1..20: mol_type = other RNA
attaggacctgctcctagat

SEQ ID NO: 31489 - RNA, 20 nt, synthetic construct
  source 1..20: mol_type = other RNA
attatctcaacagagcaaat

SEQ ID NO: 31490 - RNA, 20 nt, synthetic construct
  source 1..20: mol_type = other RNA
attattgaaaaagatgaagg

SEQ ID NO: 31491 - RNA, 20 nt, synthetic construct
  source 1..20: mol_type = other RNA
attgaaaaagatgaaggtcc

SEQ ID NO: 31492 - RNA, 20 nt, synthetic construct
  source 1..20: mol_type = other RNA
atttctctaatagctgccac

SEQ ID NO: 31493 - RNA, 20 nt, synthetic construct
  source 1..20: mol_type = other RNA
atttgctctgttgagataat

SEQ ID NO: 31494 - RNA, 20 nt, synthetic construct
  source 1..20: mol_type = other RNA
caaaggcacagggcagatta

SEQ ID NO: 31495 - RNA, 20 nt, synthetic construct
  source 1..20: mol_type = other RNA
caacagagcaaattattgaa

SEQ ID NO: 31496 - RNA, 20 nt, synthetic construct
  source 1..20: mol_type = other RNA
caataatttgctctgttgag

SEQ ID NO: 31497 - RNA, 20 nt, synthetic construct
  source 1..20: mol_type = other RNA
cacattaggacctgctccta

SEQ ID NO: 31498 - RNA, 20 nt, synthetic construct
  source 1..20: mol_type = other RNA
cagagcaaattattgaaaaa

SEQ ID NO: 31499 - RNA, 20 nt, synthetic construct
  source 1..20: mol_type = other RNA
cagctattagagaaatcatg

SEQ ID NO: 31500 - RNA, 20 nt, synthetic construct
  source 1..20: mol_type = other RNA
caggtcctaatgtggcagct

SEQ ID NO: 31501 - RNA, 20 nt, synthetic construct
  source 1..20: mol_type = other RNA
catctaggagcaggtcctaa

SEQ ID NO: 31502 - RNA, 20 nt, synthetic construct
  source 1..20: mol_type = other RNA
catctttttcaataatttgc

SEQ ID NO: 31503 - RNA, 20 nt, synthetic construct
  source 1..20: mol_type = other RNA
catgatttctctaatagctg

SEQ ID NO: 31504 - RNA, 20 nt, synthetic construct
  source 1..20: mol_type = other RNA
catggaagaaaggtaattaa

SEQ ID NO: 31505 - RNA, 20 nt, synthetic construct
  source 1..20: mol_type = other RNA
cattaggacctgctcctaga

SEQ ID NO: 31506 - RNA, 20 nt, synthetic construct
  source 1..20: mol_type = other RNA
ccacattaggacctgctcct

SEQ ID NO: 31507 - RNA, 20 nt, synthetic construct
  source 1..20: mol_type = other RNA
ccatctaggagcaggtccta

SEQ ID NO: 31508 - RNA, 20 nt, synthetic construct
  source 1..20: mol_type = other RNA
ccatgatttctctaatagct

SEQ ID NO: 31509 - RNA, 20 nt, synthetic construct
  source 1..20: mol_type = other RNA
cccatctaggagcaggtcct

SEQ ID NO: 31510 - RNA, 20 nt, synthetic construct
  source 1..20: mol_type = other RNA
ccctgtgcctttgcgttaat

SEQ ID NO: 31511 - RNA, 20 nt, synthetic construct
  source 1..20: mol_type = other RNA
cctaatgtggcagctattag

SEQ ID NO: 31512 - RNA, 20 nt, synthetic construct
  source 1..20: mol_type = other RNA
cctagatgggtataaaaagg

SEQ ID NO: 31513 - RNA, 20 nt, synthetic construct
  source 1..20: mol_type = other RNA
cctgctcctagatgggtata

SEQ ID NO: 31514 - RNA, 20 nt, synthetic construct
  source 1..20: mol_type = other RNA
cctgtgcctttgcgttaatt

SEQ ID NO: 31515 - RNA, 20 nt, synthetic construct
  source 1..20: mol_type = other RNA
ccttcatctttttcaataat

SEQ ID NO: 31516 - RNA, 20 nt, synthetic construct
  source 1..20: mol_type = other RNA
cctttcttccatgatttctc

SEQ ID NO: 31517 - RNA, 20 nt, synthetic construct
  source 1..20: mol_type = other RNA
cctttgcgttaattaccttt

SEQ ID NO: 31518 - RNA, 20 nt, synthetic construct
  source 1..20: mol_type = other RNA
cctttttatacccatctagg

SEQ ID NO: 31519 - RNA, 20 nt, synthetic construct
  source 1..20: mol_type = other RNA
cgcaaaggcacagggcagat

SEQ ID NO: 31520 - RNA, 20 nt, synthetic construct
  source 1..20: mol_type = other RNA
cgttaatctgccctgtgcct

SEQ ID NO: 31521 - RNA, 20 nt, synthetic construct
  source 1..20: mol_type = other RNA
cgttaattacctttcttcca

SEQ ID NO: 31522 - RNA, 20 nt, synthetic construct
  source 1..20: mol_type = other RNA
ctaatagctgccacattagg

SEQ ID NO: 31523 - RNA, 20 nt, synthetic construct
  source 1..20: mol_type = other RNA
ctaatgtggcagctattaga

SEQ ID NO: 31524 - RNA, 20 nt, synthetic construct
  source 1..20: mol_type = other RNA
ctagatgggtataaaaagga

SEQ ID NO: 31525 - RNA, 20 nt, synthetic construct
  source 1..20: mol_type = other RNA
ctaggagcaggtcctaatgt

SEQ ID NO: 31526 - RNA, 20 nt, synthetic construct
  source 1..20: mol_type = other RNA
ctattagagaaatcatggaa

SEQ ID NO: 31527 - RNA, 20 nt, synthetic construct
  source 1..20: mol_type = other RNA
ctattatctcaacagagcaa

SEQ ID NO: 31528 - RNA, 20 nt, synthetic construct
  source 1..20: mol_type = other RNA
ctcaacagagcaaattattg

SEQ ID NO: 31529 - RNA, 20 nt, synthetic construct
  source 1..20: mol_type = other RNA
ctcctagatgggtataaaaa

SEQ ID NO: 31530 - RNA, 20 nt, synthetic construct
  source 1..20: mol_type = other RNA
ctctaatagctgccacatta

SEQ ID NO: 31531 - RNA, 20 nt, synthetic construct
  source 1..20: mol_type = other RNA
ctctgttgagataatagaag

SEQ ID NO: 31532 - RNA, 20 nt, synthetic construct
  source 1..20: mol_type = other RNA
ctgccacattaggacctgct

SEQ ID NO: 31533 - RNA, 20 nt, synthetic construct
  source 1..20: mol_type = other RNA
ctgccctgtgcctttgcgtt

SEQ ID NO: 31534 - RNA, 20 nt, synthetic construct
  source 1..20: mol_type = other RNA
ctgctcctagatgggtataa

SEQ ID NO: 31535 - RNA, 20 nt, synthetic construct
  source 1..20: mol_type = other RNA
ctgtgcctttgcgttaatta

SEQ ID NO: 31536 - RNA, 20 nt, synthetic construct
  source 1..20: mol_type = other RNA
ctgttgagataatagaagat

SEQ ID NO: 31537 - RNA, 20 nt, synthetic construct
  source 1..20: mol_type = other RNA
cttccatgatttctctaata

SEQ ID NO: 31538 - RNA, 20 nt, synthetic construct
  source 1..20: mol_type = other RNA
cttctattatctcaacagag

SEQ ID NO: 31539 - RNA, 20 nt, synthetic construct
  source 1..20: mol_type = other RNA
ctttcttccatgatttctct

SEQ ID NO: 31540 - RNA, 20 nt, synthetic construct
  source 1..20: mol_type = other RNA
ctttgcgttaattacctttc

SEQ ID NO: 31541 - RNA, 20 nt, synthetic construct
  source 1..20: mol_type = other RNA
ctttttatacccatctagga

SEQ ID NO: 31542 - RNA, 20 nt, synthetic construct
  source 1..20: mol_type = other RNA
ctttttcaataatttgctct

SEQ ID NO: 31543 - RNA, 20 nt, synthetic construct
  source 1..20: mol_type = other RNA
gaaaaagatgaaggtccttt

SEQ ID NO: 31544 - RNA, 20 nt, synthetic construct
  source 1..20: mol_type = other RNA
gaaaggtaattaacgcaaag

SEQ ID NO: 31545 - RNA, 20 nt, synthetic construct
  source 1..20: mol_type = other RNA
gaaatcatggaagaaaggta

SEQ ID NO: 31546 - RNA, 20 nt, synthetic construct
  source 1..20: mol_type = other RNA
gaagaaaggtaattaacgca

SEQ ID NO: 31547 - RNA, 20 nt, synthetic construct
  source 1..20: mol_type = other RNA
gaaggtcctttttataccca

SEQ ID NO: 31548 - RNA, 20 nt, synthetic construct
  source 1..20: mol_type = other RNA
gacctgctcctagatgggta

SEQ ID NO: 31549 - RNA, 20 nt, synthetic construct
  source 1..20: mol_type = other RNA
gaccttcatctttttcaata

SEQ ID NO: 31550 - RNA, 20 nt, synthetic construct
  source 1..20: mol_type = other RNA
gagaaatcatggaagaaagg

SEQ ID NO: 31551 - RNA, 20 nt, synthetic construct
  source 1..20: mol_type = other RNA
gagcaaattattgaaaaaga

SEQ ID NO: 31552 - RNA, 20 nt, synthetic construct
  source 1..20: mol_type = other RNA
gagcaggtcctaatgtggca

SEQ ID NO: 31553 - RNA, 20 nt, synthetic construct
  source 1..20: mol_type = other RNA
gaggtctaaaataataatct

SEQ ID NO: 31554 - RNA, 20 nt, synthetic construct
  source 1..20: mol_type = other RNA
gatgaaggtcctttttatac

SEQ ID NO: 31555 - RNA, 20 nt, synthetic construct
  source 1..20: mol_type = other RNA
gatgggtataaaaaggacct

SEQ ID NO: 31556 - RNA, 20 nt, synthetic construct
  source 1..20: mol_type = other RNA
gatttctctaatagctgcca

SEQ ID NO: 31557 - RNA, 20 nt, synthetic construct
  source 1..20: mol_type = other RNA
gcaaaggcacagggcagatt

SEQ ID NO: 31558 - RNA, 20 nt, synthetic construct
  source 1..20: mol_type = other RNA
gcaaattattgaaaaagatg

SEQ ID NO: 31559 - RNA, 20 nt, synthetic construct
  source 1..20: mol_type = other RNA
gcagctattagagaaatcat

SEQ ID NO: 31560 - RNA, 20 nt, synthetic construct
  source 1..20: mol_type = other RNA
gcaggtcctaatgtggcagc

SEQ ID NO: 31561 - RNA, 20 nt, synthetic construct
  source 1..20: mol_type = other RNA
gccacattaggacctgctcc

SEQ ID NO: 31562 - RNA, 20 nt, synthetic construct
  source 1..20: mol_type = other RNA
gccctgtgcctttgcgttaa

SEQ ID NO: 31563 - RNA, 20 nt, synthetic construct
  source 1..20: mol_type = other RNA
gcctttgcgttaattacctt

SEQ ID NO: 31564 - RNA, 20 nt, synthetic construct
  source 1..20: mol_type = other RNA
gcgttaattacctttcttcc

SEQ ID NO: 31565 - RNA, 20 nt, synthetic construct
  source 1..20: mol_type = other RNA
gctattagagaaatcatgga

SEQ ID NO: 31566 - RNA, 20 nt, synthetic construct
  source 1..20: mol_type = other RNA
gctcctagatgggtataaaa

SEQ ID NO: 31567 - RNA, 20 nt, synthetic construct
  source 1..20: mol_type = other RNA
gctctgttgagataatagaa

SEQ ID NO: 31568 - RNA, 20 nt, synthetic construct
  source 1..20: mol_type = other RNA
gctgccacattaggacctgc

SEQ ID NO: 31569 - RNA, 20 nt, synthetic construct
  source 1..20: mol_type = other RNA
ggaagaaaggtaattaacgc

SEQ ID NO: 31570 - RNA, 20 nt, synthetic construct
  source 1..20: mol_type = other RNA
ggacctgctcctagatgggt

SEQ ID NO: 31571 - RNA, 20 nt, synthetic construct
  source 1..20: mol_type = other RNA
ggaccttcatctttttcaat

SEQ ID NO: 31572 - RNA, 20 nt, synthetic construct
  source 1..20: mol_type = other RNA
ggagcaggtcctaatgtggc

SEQ ID NO: 31573 - RNA, 20 nt, synthetic construct
  source 1..20: mol_type = other RNA
ggcagctattagagaaatca

SEQ ID NO: 31574 - RNA, 20 nt, synthetic construct
  source 1..20: mol_type = other RNA
gggtataaaaaggaccttca

SEQ ID NO: 31575 - RNA, 20 nt, synthetic construct
  source 1..20: mol_type = other RNA
ggtaattaacgcaaaggcac

SEQ ID NO: 31576 - RNA, 20 nt, synthetic construct
  source 1..20: mol_type = other RNA
ggtataaaaaggaccttcat

SEQ ID NO: 31577 - RNA, 20 nt, synthetic construct
  source 1..20: mol_type = other RNA
ggtcctaatgtggcagctat

SEQ ID NO: 31578 - RNA, 20 nt, synthetic construct
  source 1..20: mol_type = other RNA
ggtcctttttatacccatct

SEQ ID NO: 31579 - RNA, 20 nt, synthetic construct
  source 1..20: mol_type = other RNA
ggtctaaaataataatcttc

SEQ ID NO: 31580 - RNA, 20 nt, synthetic construct
  source 1..20: mol_type = other RNA
gtaattaacgcaaaggcaca

SEQ ID NO: 31581 - RNA, 20 nt, synthetic construct
  source 1..20: mol_type = other RNA
gtataaaaaggaccttcatc

SEQ ID NO: 31582 - RNA, 20 nt, synthetic construct
  source 1..20: mol_type = other RNA
gtcctaatgtggcagctatt

SEQ ID NO: 31583 - RNA, 20 nt, synthetic construct
  source 1..20: mol_type = other RNA
gtcctttttatacccatcta

SEQ ID NO: 31584 - RNA, 20 nt, synthetic construct
  source 1..20: mol_type = other RNA
gtgcctttgcgttaattacc

SEQ ID NO: 31585 - RNA, 20 nt, synthetic construct
  source 1..20: mol_type = other RNA
gtggcagctattagagaaat

SEQ ID NO: 31586 - RNA, 20 nt, synthetic construct
  source 1..20: mol_type = other RNA
gttaatctgccctgtgcctt

SEQ ID NO: 31587 - RNA, 20 nt, synthetic construct
  source 1..20: mol_type = other RNA
gttaattacctttcttccat

SEQ ID NO: 31588 - RNA, 20 nt, synthetic construct
  source 1..20: mol_type = other RNA
gttgagataatagaagatta

SEQ ID NO: 31589 - RNA, 20 nt, synthetic construct
  source 1..20: mol_type = other RNA
taaaaaggaccttcatcttt

SEQ ID NO: 31590 - RNA, 20 nt, synthetic construct
  source 1..20: mol_type = other RNA
taaacgttaatctgccctgt

SEQ ID NO: 31591 - RNA, 20 nt, synthetic construct
  source 1..20: mol_type = other RNA
taacgcaaaggcacagggca

SEQ ID NO: 31592 - RNA, 20 nt, synthetic construct
  source 1..20: mol_type = other RNA
taatagctgccacattagga

SEQ ID NO: 31593 - RNA, 20 nt, synthetic construct
  source 1..20: mol_type = other RNA
taatctgccctgtgcctttg

SEQ ID NO: 31594 - RNA, 20 nt, synthetic construct
  source 1..20: mol_type = other RNA
taatcttctattatctcaac

SEQ ID NO: 31595 - RNA, 20 nt, synthetic construct
  source 1..20: mol_type = other RNA
taatgtggcagctattagag

SEQ ID NO: 31596 - RNA, 20 nt, synthetic construct
  source 1..20: mol_type = other RNA
taattaacgcaaaggcacag

SEQ ID NO: 31597 - RNA, 20 nt, synthetic construct
  source 1..20: mol_type = other RNA
taattacctttcttccatga

SEQ ID NO: 31598 - RNA, 20 nt, synthetic construct
  source 1..20: mol_type = other RNA
taatttgctctgttgagata

SEQ ID NO: 31599 - RNA, 20 nt, synthetic construct
  source 1..20: mol_type = other RNA
tacccatctaggagcaggtc

SEQ ID NO: 31600 - RNA, 20 nt, synthetic construct
  source 1..20: mol_type = other RNA
tacctttcttccatgatttc

SEQ ID NO: 31601 - RNA, 20 nt, synthetic construct
  source 1..20: mol_type = other RNA
tagagaaatcatggaagaaa

SEQ ID NO: 31602 - RNA, 20 nt, synthetic construct
  source 1..20: mol_type = other RNA
tagatgggtataaaaaggac

SEQ ID NO: 31603 - RNA, 20 nt, synthetic construct
  source 1..20: mol_type = other RNA
tagctgccacattaggacct

SEQ ID NO: 31604 - RNA, 20 nt, synthetic construct
  source 1..20: mol_type = other RNA
taggacctgctcctagatgg

SEQ ID NO: 31605 - RNA, 20 nt, synthetic construct
  source 1..20: mol_type = other RNA
taggagcaggtcctaatgtg

SEQ ID NO: 31606 - RNA, 20 nt, synthetic construct
  source 1..20: mol_type = other RNA
tataaaaaggaccttcatct

SEQ ID NO: 31607 - RNA, 20 nt, synthetic construct
  source 1..20: mol_type = other RNA
tatacccatctaggagcagg

SEQ ID NO: 31608 - RNA, 20 nt, synthetic construct
  source 1..20: mol_type = other RNA
tatctcaacagagcaaatta

SEQ ID NO: 31609 - RNA, 20 nt, synthetic construct
  source 1..20: mol_type = other RNA
tattagagaaatcatggaag

SEQ ID NO: 31610 - RNA, 20 nt, synthetic construct
  source 1..20: mol_type = other RNA
tattatctcaacagagcaaa

SEQ ID NO: 31611 - RNA, 20 nt, synthetic construct
  source 1..20: mol_type = other RNA
tattgaaaaagatgaaggtc

SEQ ID NO: 31612 - RNA, 20 nt, synthetic construct
  source 1..20: mol_type = other RNA
tcaacagagcaaattattga

SEQ ID NO: 31613 - RNA, 20 nt, synthetic construct
  source 1..20: mol_type = other RNA
tcaataatttgctctgttga

SEQ ID NO: 31614 - RNA, 20 nt, synthetic construct
  source 1..20: mol_type = other RNA
tcatggaagaaaggtaatta

SEQ ID NO: 31615 - RNA, 20 nt, synthetic construct
  source 1..20: mol_type = other RNA
tccatgatttctctaatagc

SEQ ID NO: 31616 - RNA, 20 nt, synthetic construct
  source 1..20: mol_type = other RNA
tcctaatgtggcagctatta

SEQ ID NO: 31617 - RNA, 20 nt, synthetic construct
  source 1..20: mol_type = other RNA
tcctagatgggtataaaaag

SEQ ID NO: 31618 - RNA, 20 nt, synthetic construct
  source 1..20: mol_type = other RNA
tcctttttatacccatctag

SEQ ID NO: 31619 - RNA, 20 nt, synthetic construct
  source 1..20: mol_type = other RNA
tctaatagctgccacattag

SEQ ID NO: 31620 - RNA, 20 nt, synthetic construct
  source 1..20: mol_type = other RNA
tctaggagcaggtcctaatg

SEQ ID NO: 31621 - RNA, 20 nt, synthetic construct
  source 1..20: mol_type = other RNA
tctattatctcaacagagca

SEQ ID NO: 31622 - RNA, 20 nt, synthetic construct
  source 1..20: mol_type = other RNA
tctcaacagagcaaattatt

SEQ ID NO: 31623 - RNA, 20 nt, synthetic construct
  source 1..20: mol_type = other RNA
tctctaatagctgccacatt

SEQ ID NO: 31624 - RNA, 20 nt, synthetic construct
  source 1..20: mol_type = other RNA
tctgccctgtgcctttgcgt

SEQ ID NO: 31625 - RNA, 20 nt, synthetic construct
  source 1..20: mol_type = other RNA
tctgttgagataatagaaga

SEQ ID NO: 31626 - RNA, 20 nt, synthetic construct
  source 1..20: mol_type = other RNA
tcttccatgatttctctaat

SEQ ID NO: 31627 - RNA, 20 nt, synthetic construct
  source 1..20: mol_type = other RNA
tcttctattatctcaacaga

SEQ ID NO: 31628 - RNA, 20 nt, synthetic construct
  source 1..20: mol_type = other RNA
tctttttcaataatttgctc

SEQ ID NO: 31629 - RNA, 20 nt, synthetic construct
  source 1..20: mol_type = other RNA
tgaaaaagatgaaggtcctt

SEQ ID NO: 31630 - RNA, 20 nt, synthetic construct
  source 1..20: mol_type = other RNA
tgaaggtcctttttataccc

SEQ ID NO: 31631 - RNA, 20 nt, synthetic construct
  source 1..20: mol_type = other RNA
tgaggtctaaaataataatc

SEQ ID NO: 31632 - RNA, 20 nt, synthetic construct
  source 1..20: mol_type = other RNA
tgatttctctaatagctgcc

SEQ ID NO: 31633 - RNA, 20 nt, synthetic construct
  source 1..20: mol_type = other RNA
tgccacattaggacctgctc

SEQ ID NO: 31634 - RNA, 20 nt, synthetic construct
  source 1..20: mol_type = other RNA
tgccctgtgcctttgcgtta

SEQ ID NO: 31635 - RNA, 20 nt, synthetic construct
  source 1..20: mol_type = other RNA
tgcctttgcgttaattacct

SEQ ID NO: 31636 - RNA, 20 nt, synthetic construct
  source 1..20: mol_type = other RNA
tgcgttaattacctttcttc

SEQ ID NO: 31637 - RNA, 20 nt, synthetic construct
  source 1..20: mol_type = other RNA
tgctcctagatgggtataaa

SEQ ID NO: 31638 - RNA, 20 nt, synthetic construct
  source 1..20: mol_type = other RNA
tgctctgttgagataataga

SEQ ID NO: 31639 - RNA, 20 nt, synthetic construct
  source 1..20: mol_type = other RNA
tggaagaaaggtaattaacg

SEQ ID NO: 31640 - RNA, 20 nt, synthetic construct
  source 1..20: mol_type = other RNA
tggcagctattagagaaatc

SEQ ID NO: 31641 - RNA, 20 nt, synthetic construct
  source 1..20: mol_type = other RNA
tgggtataaaaaggaccttc

SEQ ID NO: 31642 - RNA, 20 nt, synthetic construct
  source 1..20: mol_type = other RNA
tgtgcctttgcgttaattac

SEQ ID NO: 31643 - RNA, 20 nt, synthetic construct
  source 1..20: mol_type = other RNA
tgtggcagctattagagaaa

SEQ ID NO: 31644 - RNA, 20 nt, synthetic construct
  source 1..20: mol_type = other RNA
tgttgagataatagaagatt

SEQ ID NO: 31645 - RNA, 20 nt, synthetic construct
  source 1..20: mol_type = other RNA
ttaacgcaaaggcacagggc

SEQ ID NO: 31646 - RNA, 20 nt, synthetic construct
  source 1..20: mol_type = other RNA
ttaatctgccctgtgccttt

SEQ ID NO: 31647 - RNA, 20 nt, synthetic construct
  source 1..20: mol_type = other RNA
ttaattacctttcttccatg

SEQ ID NO: 31648 - RNA, 20 nt, synthetic construct
  source 1..20: mol_type = other RNA
ttacctttcttccatgattt

SEQ ID NO: 31649 - RNA, 20 nt, synthetic construct
  source 1..20: mol_type = other RNA
ttagagaaatcatggaagaa

SEQ ID NO: 31650 - RNA, 20 nt, synthetic construct
  source 1..20: mol_type = other RNA
ttaggacctgctcctagatg

SEQ ID NO: 31651 - RNA, 20 nt, synthetic construct
  source 1..20: mol_type = other RNA
ttatacccatctaggagcag

SEQ ID NO: 31652 - RNA, 20 nt, synthetic construct
  source 1..20: mol_type = other RNA
ttatctcaacagagcaaatt

SEQ ID NO: 31653 - RNA, 20 nt, synthetic construct
  source 1..20: mol_type = other RNA
ttattgaaaaagatgaaggt

SEQ ID NO: 31654 - RNA, 20 nt, synthetic construct
  source 1..20: mol_type = other RNA
ttcaataatttgctctgttg

SEQ ID NO: 31655 - RNA, 20 nt, synthetic construct
  source 1..20: mol_type = other RNA
ttccatgatttctctaatag

SEQ ID NO: 31656 - RNA, 20 nt, synthetic construct
  source 1..20: mol_type = other RNA
ttctattatctcaacagagc

SEQ ID NO: 31657 - RNA, 20 nt, synthetic construct
  source 1..20: mol_type = other RNA
ttctctaatagctgccacat

SEQ ID NO: 31658 - RNA, 20 nt, synthetic construct
  source 1..20: mol_type = other RNA
ttcttccatgatttctctaa

SEQ ID NO: 31659 - RNA, 20 nt, synthetic construct
  source 1..20: mol_type = other RNA
ttgaaaaagatgaaggtcct

SEQ ID NO: 31660 - RNA, 20 nt, synthetic construct
  source 1..20: mol_type = other RNA
ttgcgttaattacctttctt

SEQ ID NO: 31661 - RNA, 20 nt, synthetic construct
  source 1..20: mol_type = other RNA
ttgctctgttgagataatag

SEQ ID NO: 31662 - RNA, 20 nt, synthetic construct
  source 1..20: mol_type = other RNA
tttatacccatctaggagca

SEQ ID NO: 31663 - RNA, 20 nt, synthetic construct
  source 1..20: mol_type = other RNA
tttcaataatttgctctgtt

SEQ ID NO: 31664 - RNA, 20 nt, synthetic construct
  source 1..20: mol_type = other RNA
tttctctaatagctgccaca

SEQ ID NO: 31665 - RNA, 20 nt, synthetic construct
  source 1..20: mol_type = other RNA
tttcttccatgatttctcta

SEQ ID NO: 31666 - RNA, 20 nt, synthetic construct
  source 1..20: mol_type = other RNA
tttgcgttaattacctttct

SEQ ID NO: 31667 - RNA, 20 nt, synthetic construct
  source 1..20: mol_type = other RNA
tttgctctgttgagataata

SEQ ID NO: 31668 - RNA, 20 nt, synthetic construct
  source 1..20: mol_type = other RNA
ttttatacccatctaggagc

SEQ ID NO: 31669 - RNA, 20 nt, synthetic construct
  source 1..20: mol_type = other RNA
ttttcaataatttgctctgt

SEQ ID NO: 31670 - RNA, 20 nt, synthetic construct
  source 1..20: mol_type = other RNA
tttttatacccatctaggag

SEQ ID NO: 31671 - RNA, 20 nt, synthetic construct
  source 1..20: mol_type = other RNA
tttttcaataatttgctctg

SEQ ID NO: 31672 - RNA, 21 nt, synthetic construct
  source 1..21: mol_type = other RNA
aaaaagatgaaggtccttttt

SEQ ID NO: 31673 - RNA, 21 nt, synthetic construct
  source 1..21: mol_type = other RNA
aaaaaggaccttcatcttttt

SEQ ID NO: 31674 - RNA, 21 nt, synthetic construct
  source 1..21: mol_type = other RNA
aaaagatgaaggtccttttta

SEQ ID NO: 31675 - RNA, 21 nt, synthetic construct
  source 1..21: mol_type = other RNA
aaaaggaccttcatctttttc

SEQ ID NO: 31676 - RNA, 21 nt, synthetic construct
  source 1..21: mol_type = other RNA
aaacgttaatctgccctgtgc

SEQ ID NO: 31677 - RNA, 21 nt, synthetic construct
  source 1..21: mol_type = other RNA
aaagatgaaggtcctttttat

SEQ ID NO: 31678 - RNA, 21 nt, synthetic construct
  source 1..21: mol_type = other RNA
aaaggaccttcatctttttca

SEQ ID NO: 31679 - RNA, 21 nt, synthetic construct
  source 1..21: mol_type = other RNA
aaaggtaattaacgcaaaggc

SEQ ID NO: 31680 - RNA, 21 nt, synthetic construct
  source 1..21: mol_type = other RNA
aaatcatggaagaaaggtaat

SEQ ID NO: 31681 - RNA, 21 nt, synthetic construct
  source 1..21: mol_type = other RNA
aacgcaaaggcacagggcaga

SEQ ID NO: 31682 - RNA, 21 nt, synthetic construct
  source 1..21: mol_type = other RNA
aacgttaatctgccctgtgcc

SEQ ID NO: 31683 - RNA, 21 nt, synthetic construct
  source 1..21: mol_type = other RNA
aagaaaggtaattaacgcaaa

SEQ ID NO: 31684 - RNA, 21 nt, synthetic construct
  source 1..21: mol_type = other RNA
aagatgaaggtcctttttata

SEQ ID NO: 31685 - RNA, 21 nt, synthetic construct
  source 1..21: mol_type = other RNA
aaggaccttcatctttttcaa

SEQ ID NO: 31686 - RNA, 21 nt, synthetic construct
  source 1..21: mol_type = other RNA
aaggtaattaacgcaaaggca

SEQ ID NO: 31687 - RNA, 21 nt, synthetic construct
  source 1..21: mol_type = other RNA
aaggtcctttttatacccatc

SEQ ID NO: 31688 - RNA, 21 nt, synthetic construct
  source 1..21: mol_type = other RNA
aataatttgctctgttgagat

SEQ ID NO: 31689 - RNA, 21 nt, synthetic construct
  source 1..21: mol_type = other RNA
aatagctgccacattaggacc

SEQ ID NO: 31690 - RNA, 21 nt, synthetic construct
  source 1..21: mol_type = other RNA
aatcatggaagaaaggtaatt

SEQ ID NO: 31691 - RNA, 21 nt, synthetic construct
  source 1..21: mol_type = other RNA
aatctgccctgtgcctttgcg

SEQ ID NO: 31692 - RNA, 21 nt, synthetic construct
  source 1..21: mol_type = other RNA
aatcttctattatctcaacag

SEQ ID NO: 31693 - RNA, 21 nt, synthetic construct
  source 1..21: mol_type = other RNA
aatgtggcagctattagagaa

SEQ ID NO: 31694 - RNA, 21 nt, synthetic construct
  source 1..21: mol_type = other RNA
aattaacgcaaaggcacaggg

SEQ ID NO: 31695 - RNA, 21 nt, synthetic construct
  source 1..21: mol_type = other RNA
aattacctttcttccatgatt

SEQ ID NO: 31696 - RNA, 21 nt, synthetic construct
  source 1..21: mol_type = other RNA
aatttgctctgttgagataat

SEQ ID NO: 31697 - RNA, 21 nt, synthetic construct
  source 1..21: mol_type = other RNA
acattaggacctgctcctaga

SEQ ID NO: 31698 - RNA, 21 nt, synthetic construct
  source 1..21: mol_type = other RNA
acccatctaggagcaggtcct

SEQ ID NO: 31699 - RNA, 21 nt, synthetic construct
  source 1..21: mol_type = other RNA
acctgctcctagatgggtata

SEQ ID NO: 31700 - RNA, 21 nt, synthetic construct
  source 1..21: mol_type = other RNA
acctttcttccatgatttctc

SEQ ID NO: 31701 - RNA, 21 nt, synthetic construct
  source 1..21: mol_type = other RNA
acgcaaaggcacagggcagat

SEQ ID NO: 31702 - RNA, 21 nt, synthetic construct
  source 1..21: mol_type = other RNA
acgttaatctgccctgtgcct

SEQ ID NO: 31703 - RNA, 21 nt, synthetic construct
  source 1..21: mol_type = other RNA
agaaaggtaattaacgcaaag

SEQ ID NO: 31704 - RNA, 21 nt, synthetic construct
  source 1..21: mol_type = other RNA
agaaatcatggaagaaaggta

SEQ ID NO: 31705 - RNA, 21 nt, synthetic construct
  source 1..21: mol_type = other RNA
agagaaatcatggaagaaagg

SEQ ID NO: 31706 - RNA, 21 nt, synthetic construct
  source 1..21: mol_type = other RNA
agatgaaggtcctttttatac

SEQ ID NO: 31707 - RNA, 21 nt, synthetic construct
  source 1..21: mol_type = other RNA
agatgggtataaaaaggacct

SEQ ID NO: 31708 - RNA, 21 nt, synthetic construct
  source 1..21: mol_type = other RNA
agcaggtcctaatgtggcagc

SEQ ID NO: 31709 - RNA, 21 nt, synthetic construct
  source 1..21: mol_type = other RNA
agctattagagaaatcatgga

SEQ ID NO: 31710 - RNA, 21 nt, synthetic construct
  source 1..21: mol_type = other RNA
agctgccacattaggacctgc

SEQ ID NO: 31711 - RNA, 21 nt, synthetic construct
  source 1..21: mol_type = other RNA
aggacctgctcctagatgggt

SEQ ID NO: 31712 - RNA, 21 nt, synthetic construct
  source 1..21: mol_type = other RNA
aggaccttcatctttttcaat

SEQ ID NO: 31713 - RNA, 21 nt, synthetic construct
  source 1..21: mol_type = other RNA
aggagcaggtcctaatgtggc

SEQ ID NO: 31714 - RNA, 21 nt, synthetic construct
  source 1..21: mol_type = other RNA
aggtaattaacgcaaaggcac

SEQ ID NO: 31715 - RNA, 21 nt, synthetic construct
  source 1..21: mol_type = other RNA
aggtcctaatgtggcagctat

SEQ ID NO: 31716 - RNA, 21 nt, synthetic construct
  source 1..21: mol_type = other RNA
aggtcctttttatacccatct

SEQ ID NO: 31717 - RNA, 21 nt, synthetic construct
  source 1..21: mol_type = other RNA
ataaaaaggaccttcatcttt

SEQ ID NO: 31718 - RNA, 21 nt, synthetic construct
  source 1..21: mol_type = other RNA
ataaacgttaatctgccctgt

SEQ ID NO: 31719 - RNA, 21 nt, synthetic construct
  source 1..21: mol_type = other RNA
ataatttgctctgttgagata

SEQ ID NO: 31720 - RNA, 21 nt, synthetic construct
  source 1..21: mol_type = other RNA
atacccatctaggagcaggtc

SEQ ID NO: 31721 - RNA, 21 nt, synthetic construct
  source 1..21: mol_type = other RNA
atagctgccacattaggacct

SEQ ID NO: 31722 - RNA, 21 nt, synthetic construct
  source 1..21: mol_type = other RNA
atcatggaagaaaggtaatta

SEQ ID NO: 31723 - RNA, 21 nt, synthetic construct
  source 1..21: mol_type = other RNA
atctaggagcaggtcctaatg

SEQ ID NO: 31724 - RNA, 21 nt, synthetic construct
  source 1..21: mol_type = other RNA
atctcaacagagcaaattatt

SEQ ID NO: 31725 - RNA, 21 nt, synthetic construct
  source 1..21: mol_type = other RNA
atctgccctgtgcctttgcgt

SEQ ID NO: 31726 - RNA, 21 nt, synthetic construct
  source 1..21: mol_type = other RNA
atcttctattatctcaacaga

SEQ ID NO: 31727 - RNA, 21 nt, synthetic construct
  source 1..21: mol_type = other RNA
atgaaggtcctttttataccc

SEQ ID NO: 31728 - RNA, 21 nt, synthetic construct
  source 1..21: mol_type = other RNA
atgatttctctaatagctgcc

SEQ ID NO: 31729 - RNA, 21 nt, synthetic construct
  source 1..21: mol_type = other RNA
atggaagaaaggtaattaacg

SEQ ID NO: 31730 - RNA, 21 nt, synthetic construct
  source 1..21: mol_type = other RNA
atgggtataaaaaggaccttc

SEQ ID NO: 31731 - RNA, 21 nt, synthetic construct
  source 1..21: mol_type = other RNA
atgtggcagctattagagaaa

SEQ ID NO: 31732 - RNA, 21 nt, synthetic construct
  source 1..21: mol_type = other RNA
attaacgcaaaggcacagggc

SEQ ID NO: 31733 - RNA, 21 nt, synthetic construct
  source 1..21: mol_type = other RNA
attacctttcttccatgattt

SEQ ID NO: 31734 - RNA, 21 nt, synthetic construct
  source 1..21: mol_type = other RNA
attagagaaatcatggaagaa

SEQ ID NO: 31735 - RNA, 21 nt, synthetic construct
  source 1..21: mol_type = other RNA
attaggacctgctcctagatg

SEQ ID NO: 31736 - RNA, 21 nt, synthetic construct
  source 1..21: mol_type = other RNA
attatctcaacagagcaaatt

SEQ ID NO: 31737 - RNA, 21 nt, synthetic construct
  source 1..21: mol_type = other RNA
attgaaaaagatgaaggtcct

SEQ ID NO: 31738 - RNA, 21 nt, synthetic construct
  source 1..21: mol_type = other RNA
atttctctaatagctgccaca

SEQ ID NO: 31739 - RNA, 21 nt, synthetic construct
  source 1..21: mol_type = other RNA
atttgctctgttgagataata

SEQ ID NO: 31740 - RNA, 21 nt, synthetic construct
  source 1..21: mol_type = other RNA
caacagagcaaattattgaaa

SEQ ID NO: 31741 - RNA, 21 nt, synthetic construct
  source 1..21: mol_type = other RNA
caataatttgctctgttgaga

SEQ ID NO: 31742 - RNA, 21 nt, synthetic construct
  source 1..21: mol_type = other RNA
cacattaggacctgctcctag

SEQ ID NO: 31743 - RNA, 21 nt, synthetic construct
  source 1..21: mol_type = other RNA
cagagcaaattattgaaaaag

SEQ ID NO: 31744 - RNA, 21 nt, synthetic construct
  source 1..21: mol_type = other RNA
cagctattagagaaatcatgg

SEQ ID NO: 31745 - RNA, 21 nt, synthetic construct
  source 1..21: mol_type = other RNA
caggtcctaatgtggcagcta

SEQ ID NO: 31746 - RNA, 21 nt, synthetic construct
  source 1..21: mol_type = other RNA
catctaggagcaggtcctaat

SEQ ID NO: 31747 - RNA, 21 nt, synthetic construct
  source 1..21: mol_type = other RNA
catgatttctctaatagctgc

SEQ ID NO: 31748 - RNA, 21 nt, synthetic construct
  source 1..21: mol_type = other RNA
catggaagaaaggtaattaac

SEQ ID NO: 31749 - RNA, 21 nt, synthetic construct
  source 1..21: mol_type = other RNA
cattaggacctgctcctagat

SEQ ID NO: 31750 - RNA, 21 nt, synthetic construct
  source 1..21: mol_type = other RNA
ccacattaggacctgctccta

SEQ ID NO: 31751 - RNA, 21 nt, synthetic construct
  source 1..21: mol_type = other RNA
ccatctaggagcaggtcctaa

SEQ ID NO: 31752 - RNA, 21 nt, synthetic construct
  source 1..21: mol_type = other RNA
ccatgatttctctaatagctg

SEQ ID NO: 31753 - RNA, 21 nt, synthetic construct
  source 1..21: mol_type = other RNA
cccatctaggagcaggtccta

SEQ ID NO: 31754 - RNA, 21 nt, synthetic construct
  source 1..21: mol_type = other RNA
ccctgtgcctttgcgttaatt

SEQ ID NO: 31755 - RNA, 21 nt, synthetic construct
  source 1..21: mol_type = other RNA
cctaatgtggcagctattaga

SEQ ID NO: 31756 - RNA, 21 nt, synthetic construct
  source 1..21: mol_type = other RNA
cctagatgggtataaaaagga

SEQ ID NO: 31757 - RNA, 21 nt, synthetic construct
  source 1..21: mol_type = other RNA
cctgctcctagatgggtataa

SEQ ID NO: 31758 - RNA, 21 nt, synthetic construct
  source 1..21: mol_type = other RNA
cctgtgcctttgcgttaatta

SEQ ID NO: 31759 - RNA, 21 nt, synthetic construct
  source 1..21: mol_type = other RNA
cctttcttccatgatttctct

SEQ ID NO: 31760 - RNA, 21 nt, synthetic construct
  source 1..21: mol_type = other RNA
cctttgcgttaattacctttc

SEQ ID NO: 31761 - RNA, 21 nt, synthetic construct
  source 1..21: mol_type = other RNA
cctttttatacccatctagga

SEQ ID NO: 31762 - RNA, 21 nt, synthetic construct
  source 1..21: mol_type = other RNA
cgcaaaggcacagggcagatt

SEQ ID NO: 31763 - RNA, 21 nt, synthetic construct
  source 1..21: mol_type = other RNA
cgttaatctgccctgtgcctt

SEQ ID NO: 31764 - RNA, 21 nt, synthetic construct
  source 1..21: mol_type = other RNA
cgttaattacctttcttccat

SEQ ID NO: 31765 - RNA, 21 nt, synthetic construct
  source 1..21: mol_type = other RNA
ctaatagctgccacattagga

SEQ ID NO: 31766 - RNA, 21 nt, synthetic construct
  source 1..21: mol_type = other RNA
ctaatgtggcagctattagag

SEQ ID NO: 31767 - RNA, 21 nt, synthetic construct
  source 1..21: mol_type = other RNA
ctagatgggtataaaaaggac

SEQ ID NO: 31768 - RNA, 21 nt, synthetic construct
  source 1..21: mol_type = other RNA
ctaggagcaggtcctaatgtg

SEQ ID NO: 31769 - RNA, 21 nt, synthetic construct
  source 1..21: mol_type = other RNA
ctattagagaaatcatggaag

SEQ ID NO: 31770 - RNA, 21 nt, synthetic construct
  source 1..21: mol_type = other RNA
ctattatctcaacagagcaaa

SEQ ID NO: 31771 - RNA, 21 nt, synthetic construct
  source 1..21: mol_type = other RNA
ctcaacagagcaaattattga

SEQ ID NO: 31772 - RNA, 21 nt, synthetic construct
  source 1..21: mol_type = other RNA
ctcctagatgggtataaaaag

SEQ ID NO: 31773 - RNA, 21 nt, synthetic construct
  source 1..21: mol_type = other RNA
ctctaatagctgccacattag

SEQ ID NO: 31774 - RNA, 21 nt, synthetic construct
  source 1..21: mol_type = other RNA
ctctgttgagataatagaaga

SEQ ID NO: 31775 - RNA, 21 nt, synthetic construct
  source 1..21: mol_type = other RNA
ctgccacattaggacctgctc

SEQ ID NO: 31776 - RNA, 21 nt, synthetic construct
  source 1..21: mol_type = other RNA
ctgccctgtgcctttgcgtta

SEQ ID NO: 31777 - RNA, 21 nt, synthetic construct
  source 1..21: mol_type = other RNA
ctgctcctagatgggtataaa

SEQ ID NO: 31778 - RNA, 21 nt, synthetic construct
  source 1..21: mol_type = other RNA
ctgtgcctttgcgttaattac

SEQ ID NO: 31779 - RNA, 21 nt, synthetic construct
  source 1..21: mol_type = other RNA
ctgttgagataatagaagatt

SEQ ID NO: 31780 - RNA, 21 nt, synthetic construct
  source 1..21: mol_type = other RNA
cttccatgatttctctaatag

SEQ ID NO: 31781 - RNA, 21 nt, synthetic construct
  source 1..21: mol_type = other RNA
cttctattatctcaacagagc

SEQ ID NO: 31782 - RNA, 21 nt, synthetic construct
  source 1..21: mol_type = other RNA
ctttcttccatgatttctcta

SEQ ID NO: 31783 - RNA, 21 nt, synthetic construct
  source 1..21: mol_type = other RNA
ctttgcgttaattacctttct

SEQ ID NO: 31784 - RNA, 21 nt, synthetic construct
  source 1..21: mol_type = other RNA
ctttttatacccatctaggag

SEQ ID NO: 31785 - RNA, 21 nt, synthetic construct
  source 1..21: mol_type = other RNA
ctttttcaataatttgctctg

SEQ ID NO: 31786 - RNA, 21 nt, synthetic construct
  source 1..21: mol_type = other RNA
gaaaaagatgaaggtcctttt

SEQ ID NO: 31787 - RNA, 21 nt, synthetic construct
  source 1..21: mol_type = other RNA
gaaaggtaattaacgcaaagg

SEQ ID NO: 31788 - RNA, 21 nt, synthetic construct
  source 1..21: mol_type = other RNA
gaaatcatggaagaaaggtaa

SEQ ID NO: 31789 - RNA, 21 nt, synthetic construct
  source 1..21: mol_type = other RNA
gaagaaaggtaattaacgcaa

SEQ ID NO: 31790 - RNA, 21 nt, synthetic construct
  source 1..21: mol_type = other RNA
gaaggtcctttttatacccat

SEQ ID NO: 31791 - RNA, 21 nt, synthetic construct
  source 1..21: mol_type = other RNA
gacctgctcctagatgggtat

SEQ ID NO: 31792 - RNA, 21 nt, synthetic construct
  source 1..21: mol_type = other RNA
gaccttcatctttttcaataa

SEQ ID NO: 31793 - RNA, 21 nt, synthetic construct
  source 1..21: mol_type = other RNA
gagaaatcatggaagaaaggt

SEQ ID NO: 31794 - RNA, 21 nt, synthetic construct
  source 1..21: mol_type = other RNA
gagcaggtcctaatgtggcag

SEQ ID NO: 31795 - RNA, 21 nt, synthetic construct
  source 1..21: mol_type = other RNA
gatgaaggtcctttttatacc

SEQ ID NO: 31796 - RNA, 21 nt, synthetic construct
  source 1..21: mol_type = other RNA
gatgggtataaaaaggacctt

SEQ ID NO: 31797 - RNA, 21 nt, synthetic construct
  source 1..21: mol_type = other RNA
gatttctctaatagctgccac

SEQ ID NO: 31798 - RNA, 21 nt, synthetic construct
  source 1..21: mol_type = other RNA
gcaaaggcacagggcagatta

SEQ ID NO: 31799 - RNA, 21 nt, synthetic construct
  source 1..21: mol_type = other RNA
gcagctattagagaaatcatg

SEQ ID NO: 31800 - RNA, 21 nt, synthetic construct
  source 1..21: mol_type = other RNA
gcaggtcctaatgtggcagct

SEQ ID NO: 31801 - RNA, 21 nt, synthetic construct
  source 1..21: mol_type = other RNA
gccacattaggacctgctcct

SEQ ID NO: 31802 - RNA, 21 nt, synthetic construct
  source 1..21: mol_type = other RNA
gccctgtgcctttgcgttaat

SEQ ID NO: 31803 - RNA, 21 nt, synthetic construct
  source 1..21: mol_type = other RNA
gcctttgcgttaattaccttt

SEQ ID NO: 31804 - RNA, 21 nt, synthetic construct
  source 1..21: mol_type = other RNA
gcgttaattacctttcttcca

SEQ ID NO: 31805 - RNA, 21 nt, synthetic construct
  source 1..21: mol_type = other RNA
gctattagagaaatcatggaa

SEQ ID NO: 31806 - RNA, 21 nt, synthetic construct
  source 1..21: mol_type = other RNA
gctcctagatgggtataaaaa

SEQ ID NO: 31807 - RNA, 21 nt, synthetic construct
  source 1..21: mol_type = other RNA
gctctgttgagataatagaag

SEQ ID NO: 31808 - RNA, 21 nt, synthetic construct
  source 1..21: mol_type = other RNA
gctgccacattaggacctgct

SEQ ID NO: 31809 - RNA, 21 nt, synthetic construct
  source 1..21: mol_type = other RNA
ggaagaaaggtaattaacgca

SEQ ID NO: 31810 - RNA, 21 nt, synthetic construct
  source 1..21: mol_type = other RNA
ggacctgctcctagatgggta

SEQ ID NO: 31811 - RNA, 21 nt, synthetic construct
  source 1..21: mol_type = other RNA
ggaccttcatctttttcaata

SEQ ID NO: 31812 - RNA, 21 nt, synthetic construct
  source 1..21: mol_type = other RNA
ggagcaggtcctaatgtggca

SEQ ID NO: 31813 - RNA, 21 nt, synthetic construct
  source 1..21: mol_type = other RNA
ggcagctattagagaaatcat

SEQ ID NO: 31814 - RNA, 21 nt, synthetic construct
  source 1..21: mol_type = other RNA
gggtataaaaaggaccttcat

SEQ ID NO: 31815 - RNA, 21 nt, synthetic construct
  source 1..21: mol_type = other RNA
ggtaattaacgcaaaggcaca

SEQ ID NO: 31816 - RNA, 21 nt, synthetic construct
  source 1..21: mol_type = other RNA
ggtataaaaaggaccttcatc

SEQ ID NO: 31817 - RNA, 21 nt, synthetic construct
  source 1..21: mol_type = other RNA
ggtcctaatgtggcagctatt

SEQ ID NO: 31818 - RNA, 21 nt, synthetic construct
  source 1..21: mol_type = other RNA
ggtcctttttatacccatcta

SEQ ID NO: 31819 - RNA, 21 nt, synthetic construct
  source 1..21: mol_type = other RNA
gtaattaacgcaaaggcacag

SEQ ID NO: 31820 - RNA, 21 nt, synthetic construct
  source 1..21: mol_type = other RNA
gtataaaaaggaccttcatct

SEQ ID NO: 31821 - RNA, 21 nt, synthetic construct
  source 1..21: mol_type = other RNA
gtcctaatgtggcagctatta

SEQ ID NO: 31822 - RNA, 21 nt, synthetic construct
  source 1..21: mol_type = other RNA
gtcctttttatacccatctag

SEQ ID NO: 31823 - RNA, 21 nt, synthetic construct
  source 1..21: mol_type = other RNA
gtgcctttgcgttaattacct

SEQ ID NO: 31824 - RNA, 21 nt, synthetic construct
  source 1..21: mol_type = other RNA
gtggcagctattagagaaatc

SEQ ID NO: 31825 - RNA, 21 nt, synthetic construct
  source 1..21: mol_type = other RNA
gttaatctgccctgtgccttt

SEQ ID NO: 31826 - RNA, 21 nt, synthetic construct
  source 1..21: mol_type = other RNA
gttaattacctttcttccatg

SEQ ID NO: 31827 - RNA, 21 nt, synthetic construct
  source 1..21: mol_type = other RNA
taaaaaggaccttcatctttt

SEQ ID NO: 31828 - RNA, 21 nt, synthetic construct
  source 1..21: mol_type = other RNA
taaacgttaatctgccctgtg

SEQ ID NO: 31829 - RNA, 21 nt, synthetic construct
  source 1..21: mol_type = other RNA
taacgcaaaggcacagggcag

SEQ ID NO: 31830 - RNA, 21 nt, synthetic construct
  source 1..21: mol_type = other RNA
taatagctgccacattaggac

SEQ ID NO: 31831 - RNA, 21 nt, synthetic construct
  source 1..21: mol_type = other RNA
taatctgccctgtgcctttgc

SEQ ID NO: 31832 - RNA, 21 nt, synthetic construct
  source 1..21: mol_type = other RNA
taatgtggcagctattagaga

SEQ ID NO: 31833 - RNA, 21 nt, synthetic construct
  source 1..21: mol_type = other RNA
taattaacgcaaaggcacagg

SEQ ID NO: 31834 - RNA, 21 nt, synthetic construct
  source 1..21: mol_type = other RNA
taattacctttcttccatgat

SEQ ID NO: 31835 - RNA, 21 nt, synthetic construct
  source 1..21: mol_type = other RNA
taatttgctctgttgagataa

SEQ ID NO: 31836 - RNA, 21 nt, synthetic construct
  source 1..21: mol_type = other RNA
tacccatctaggagcaggtcc

SEQ ID NO: 31837 - RNA, 21 nt, synthetic construct
  source 1..21: mol_type = other RNA
tacctttcttccatgatttct

SEQ ID NO: 31838 - RNA, 21 nt, synthetic construct
  source 1..21: mol_type = other RNA
tagagaaatcatggaagaaag

SEQ ID NO: 31839 - RNA, 21 nt, synthetic construct
  source 1..21: mol_type = other RNA
tagatgggtataaaaaggacc

SEQ ID NO: 31840 - RNA, 21 nt, synthetic construct
  source 1..21: mol_type = other RNA
tagctgccacattaggacctg

SEQ ID NO: 31841 - RNA, 21 nt, synthetic construct
  source 1..21: mol_type = other RNA
taggacctgctcctagatggg

SEQ ID NO: 31842 - RNA, 21 nt, synthetic construct
  source 1..21: mol_type = other RNA
taggagcaggtcctaatgtgg

SEQ ID NO: 31843 - RNA, 21 nt, synthetic construct
  source 1..21: mol_type = other RNA
tataaaaaggaccttcatctt

SEQ ID NO: 31844 - RNA, 21 nt, synthetic construct
  source 1..21: mol_type = other RNA
tatacccatctaggagcaggt

SEQ ID NO: 31845 - RNA, 21 nt, synthetic construct
  source 1..21: mol_type = other RNA
tatctcaacagagcaaattat

SEQ ID NO: 31846 - RNA, 21 nt, synthetic construct
  source 1..21: mol_type = other RNA
tattagagaaatcatggaaga

SEQ ID NO: 31847 - RNA, 21 nt, synthetic construct
  source 1..21: mol_type = other RNA
tattatctcaacagagcaaat

SEQ ID NO: 31848 - RNA, 21 nt, synthetic construct
  source 1..21: mol_type = other RNA
tattgaaaaagatgaaggtcc

SEQ ID NO: 31849 - RNA, 21 nt, synthetic construct
  source 1..21: mol_type = other RNA
tcaacagagcaaattattgaa

SEQ ID NO: 31850 - RNA, 21 nt, synthetic construct
  source 1..21: mol_type = other RNA
tcaataatttgctctgttgag

SEQ ID NO: 31851 - RNA, 21 nt, synthetic construct
  source 1..21: mol_type = other RNA
tcatggaagaaaggtaattaa

SEQ ID NO: 31852 - RNA, 21 nt, synthetic construct
  source 1..21: mol_type = other RNA
tccatgatttctctaatagct

SEQ ID NO: 31853 - RNA, 21 nt, synthetic construct
  source 1..21: mol_type = other RNA
tcctaatgtggcagctattag

SEQ ID NO: 31854 - RNA, 21 nt, synthetic construct
  source 1..21: mol_type = other RNA
tcctagatgggtataaaaagg

SEQ ID NO: 31855 - RNA, 21 nt, synthetic construct
  source 1..21: mol_type = other RNA
tcctttttatacccatctagg

SEQ ID NO: 31856 - RNA, 21 nt, synthetic construct
  source 1..21: mol_type = other RNA
tctaatagctgccacattagg

SEQ ID NO: 31857 - RNA, 21 nt, synthetic construct
  source 1..21: mol_type = other RNA
tctaggagcaggtcctaatgt

SEQ ID NO: 31858 - RNA, 21 nt, synthetic construct
  source 1..21: mol_type = other RNA
tctattatctcaacagagcaa

SEQ ID NO: 31859 - RNA, 21 nt, synthetic construct
  source 1..21: mol_type = other RNA
tctcaacagagcaaattattg

SEQ ID NO: 31860 - RNA, 21 nt, synthetic construct
  source 1..21: mol_type = other RNA
tctctaatagctgccacatta

SEQ ID NO: 31861 - RNA, 21 nt, synthetic construct
  source 1..21: mol_type = other RNA
tctgccctgtgcctttgcgtt

SEQ ID NO: 31862 - RNA, 21 nt, synthetic construct
  source 1..21: mol_type = other RNA
tctgttgagataatagaagat

SEQ ID NO: 31863 - RNA, 21 nt, synthetic construct
  source 1..21: mol_type = other RNA
tcttccatgatttctctaata

SEQ ID NO: 31864 - RNA, 21 nt, synthetic construct
  source 1..21: mol_type = other RNA
tcttctattatctcaacagag

SEQ ID NO: 31865 - RNA, 21 nt, synthetic construct
  source 1..21: mol_type = other RNA
tgaaaaagatgaaggtccttt

SEQ ID NO: 31866 - RNA, 21 nt, synthetic construct
  source 1..21: mol_type = other RNA
tgaaggtcctttttataccca

SEQ ID NO: 31867 - RNA, 21 nt, synthetic construct
  source 1..21: mol_type = other RNA
tgatttctctaatagctgcca

SEQ ID NO: 31868 - RNA, 21 nt, synthetic construct
  source 1..21: mol_type = other RNA
tgccacattaggacctgctcc

SEQ ID NO: 31869 - RNA, 21 nt, synthetic construct
  source 1..21: mol_type = other RNA
tgccctgtgcctttgcgttaa

SEQ ID NO: 31870 - RNA, 21 nt, synthetic construct
  source 1..21: mol_type = other RNA
tgcctttgcgttaattacctt

SEQ ID NO: 31871 - RNA, 21 nt, synthetic construct
  source 1..21: mol_type = other RNA
tgcgttaattacctttcttcc

SEQ ID NO: 31872 - RNA, 21 nt, synthetic construct
  source 1..21: mol_type = other RNA
tgctcctagatgggtataaaa

SEQ ID NO: 31873 - RNA, 21 nt, synthetic construct
  source 1..21: mol_type = other RNA
tgctctgttgagataatagaa

SEQ ID NO: 31874 - RNA, 21 nt, synthetic construct
  source 1..21: mol_type = other RNA
tggaagaaaggtaattaacgc

SEQ ID NO: 31875 - RNA, 21 nt, synthetic construct
  source 1..21: mol_type = other RNA
tggcagctattagagaaatca

SEQ ID NO: 31876 - RNA, 21 nt, synthetic construct
  source 1..21: mol_type = other RNA
tgggtataaaaaggaccttca

SEQ ID NO: 31877 - RNA, 21 nt, synthetic construct
  source 1..21: mol_type = other RNA
tgtgcctttgcgttaattacc

SEQ ID NO: 31878 - RNA, 21 nt, synthetic construct
  source 1..21: mol_type = other RNA
tgtggcagctattagagaaat

SEQ ID NO: 31879 - RNA, 21 nt, synthetic construct
  source 1..21: mol_type = other RNA
ttaacgcaaaggcacagggca

SEQ ID NO: 31880 - RNA, 21 nt, synthetic construct
  source 1..21: mol_type = other RNA
ttaatctgccctgtgcctttg

SEQ ID NO: 31881 - RNA, 21 nt, synthetic construct
  source 1..21: mol_type = other RNA
ttaattacctttcttccatga

SEQ ID NO: 31882 - RNA, 21 nt, synthetic construct
  source 1..21: mol_type = other RNA
ttacctttcttccatgatttc

SEQ ID NO: 31883 - RNA, 21 nt, synthetic construct
  source 1..21: mol_type = other RNA
ttagagaaatcatggaagaaa

SEQ ID NO: 31884 - RNA, 21 nt, synthetic construct
  source 1..21: mol_type = other RNA
ttaggacctgctcctagatgg

SEQ ID NO: 31885 - RNA, 21 nt, synthetic construct
  source 1..21: mol_type = other RNA
ttatacccatctaggagcagg

SEQ ID NO: 31886 - RNA, 21 nt, synthetic construct
  source 1..21: mol_type = other RNA
ttatctcaacagagcaaatta

SEQ ID NO: 31887 - RNA, 21 nt, synthetic construct
  source 1..21: mol_type = other RNA
ttattgaaaaagatgaaggtc

SEQ ID NO: 31888 - RNA, 21 nt, synthetic construct
  source 1..21: mol_type = other RNA
ttcaataatttgctctgttga

SEQ ID NO: 31889 - RNA, 21 nt, synthetic construct
  source 1..21: mol_type = other RNA
ttccatgatttctctaatagc

SEQ ID NO: 31890 - RNA, 21 nt, synthetic construct
  source 1..21: mol_type = other RNA
ttctattatctcaacagagca

SEQ ID NO: 31891 - RNA, 21 nt, synthetic construct
  source 1..21: mol_type = other RNA
ttctctaatagctgccacatt

SEQ ID NO: 31892 - RNA, 21 nt, synthetic construct
  source 1..21: mol_type = other RNA
ttcttccatgatttctctaat

SEQ ID NO: 31893 - RNA, 21 nt, synthetic construct
  source 1..21: mol_type = other RNA
ttgaaaaagatgaaggtcctt

SEQ ID NO: 31894 - RNA, 21 nt, synthetic construct
  source 1..21: mol_type = other RNA
ttgcgttaattacctttcttc

SEQ ID NO: 31895 - RNA, 21 nt, synthetic construct
  source 1..21: mol_type = other RNA
ttgctctgttgagataataga

SEQ ID NO: 31896 - RNA, 21 nt, synthetic construct
  source 1..21: mol_type = other RNA
tttatacccatctaggagcag

SEQ ID NO: 31897 - RNA, 21 nt, synthetic construct
  source 1..21: mol_type = other RNA
tttcaataatttgctctgttg

SEQ ID NO: 31898 - RNA, 21 nt, synthetic construct
  source 1..21: mol_type = other RNA
tttctctaatagctgccacat

SEQ ID NO: 31899 - RNA, 21 nt, synthetic construct
  source 1..21: mol_type = other RNA
tttcttccatgatttctctaa

SEQ ID NO: 31900 - RNA, 21 nt, synthetic construct
  source 1..21: mol_type = other RNA
tttgcgttaattacctttctt

SEQ ID NO: 31901 - RNA, 21 nt, synthetic construct
  source 1..21: mol_type = other RNA
tttgctctgttgagataatag

SEQ ID NO: 31902 - RNA, 21 nt, synthetic construct
  source 1..21: mol_type = other RNA
ttttatacccatctaggagca

SEQ ID NO: 31903 - RNA, 21 nt, synthetic construct
  source 1..21: mol_type = other RNA
tttttatacccatctaggagc

SEQ ID NO: 31904 - RNA, 22 nt, synthetic construct
  source 1..22: mol_type = other RNA
aaaaagatgaaggtccttttta

SEQ ID NO: 31905 - RNA, 22 nt, synthetic construct
  source 1..22: mol_type = other RNA
aaaaaggaccttcatctttttc

SEQ ID NO: 31906 - RNA, 22 nt, synthetic construct
  source 1..22: mol_type = other RNA
aaaagatgaaggtcctttttat

SEQ ID NO: 31907 - RNA, 22 nt, synthetic construct
  source 1..22: mol_type = other RNA
aaaaggaccttcatctttttca

SEQ ID NO: 31908 - RNA, 22 nt, synthetic construct
  source 1..22: mol_type = other RNA
aaacgttaatctgccctgtgcc

SEQ ID NO: 31909 - RNA, 22 nt, synthetic construct
  source 1..22: mol_type = other RNA
aaagatgaaggtcctttttata

SEQ ID NO: 31910 - RNA, 22 nt, synthetic construct
  source 1..22: mol_type = other RNA
aaaggaccttcatctttttcaa

SEQ ID NO: 31911 - RNA, 22 nt, synthetic construct
  source 1..22: mol_type = other RNA
aaaggtaattaacgcaaaggca

SEQ ID NO: 31912 - RNA, 22 nt, synthetic construct
  source 1..22: mol_type = other RNA
aaatcatggaagaaaggtaatt

SEQ ID NO: 31913 - RNA, 22 nt, synthetic construct
  source 1..22: mol_type = other RNA
aacgcaaaggcacagggcagat

SEQ ID NO: 31914 - RNA, 22 nt, synthetic construct
  source 1..22: mol_type = other RNA
aacgttaatctgccctgtgcct

SEQ ID NO: 31915 - RNA, 22 nt, synthetic construct
  source 1..22: mol_type = other RNA
aagaaaggtaattaacgcaaag

SEQ ID NO: 31916 - RNA, 22 nt, synthetic construct
  source 1..22: mol_type = other RNA
aagatgaaggtcctttttatac

SEQ ID NO: 31917 - RNA, 22 nt, synthetic construct
  source 1..22: mol_type = other RNA
aaggaccttcatctttttcaat

SEQ ID NO: 31918 - RNA, 22 nt, synthetic construct
  source 1..22: mol_type = other RNA
aaggtaattaacgcaaaggcac

SEQ ID NO: 31919 - RNA, 22 nt, synthetic construct
  source 1..22: mol_type = other RNA
aaggtcctttttatacccatct

SEQ ID NO: 31920 - RNA, 22 nt, synthetic construct
  source 1..22: mol_type = other RNA
aataatttgctctgttgagata

SEQ ID NO: 31921 - RNA, 22 nt, synthetic construct
  source 1..22: mol_type = other RNA
aatagctgccacattaggacct

SEQ ID NO: 31922 - RNA, 22 nt, synthetic construct
  source 1..22: mol_type = other RNA
aatcatggaagaaaggtaatta

SEQ ID NO: 31923 - RNA, 22 nt, synthetic construct
  source 1..22: mol_type = other RNA
aatctgccctgtgcctttgcgt

SEQ ID NO: 31924 - RNA, 22 nt, synthetic construct
  source 1..22: mol_type = other RNA
aatcttctattatctcaacaga

SEQ ID NO: 31925 - RNA, 22 nt, synthetic construct
  source 1..22: mol_type = other RNA
aatgtggcagctattagagaaa

SEQ ID NO: 31926 - RNA, 22 nt, synthetic construct
  source 1..22: mol_type = other RNA
aattaacgcaaaggcacagggc

SEQ ID NO: 31927 - RNA, 22 nt, synthetic construct
  source 1..22: mol_type = other RNA
aattacctttcttccatgattt

SEQ ID NO: 31928 - RNA, 22 nt, synthetic construct
  source 1..22: mol_type = other RNA
aatttgctctgttgagataata

SEQ ID NO: 31929 - RNA, 22 nt, synthetic construct
  source 1..22: mol_type = other RNA
acagagcaaattattgaaaaag

SEQ ID NO: 31930 - RNA, 22 nt, synthetic construct
  source 1..22: mol_type = other RNA
acattaggacctgctcctagat

SEQ ID NO: 31931 - RNA, 22 nt, synthetic construct
  source 1..22: mol_type = other RNA
acccatctaggagcaggtccta

SEQ ID NO: 31932 - RNA, 22 nt, synthetic construct
  source 1..22: mol_type = other RNA
acctgctcctagatgggtataa

SEQ ID NO: 31933 - RNA, 22 nt, synthetic construct
  source 1..22: mol_type = other RNA
acctttcttccatgatttctct

SEQ ID NO: 31934 - RNA, 22 nt, synthetic construct
  source 1..22: mol_type = other RNA
acgcaaaggcacagggcagatt

SEQ ID NO: 31935 - RNA, 22 nt, synthetic construct
  source 1..22: mol_type = other RNA
acgttaatctgccctgtgcctt

SEQ ID NO: 31936 - RNA, 22 nt, synthetic construct
  source 1..22: mol_type = other RNA
agaaaggtaattaacgcaaagg

SEQ ID NO: 31937 - RNA, 22 nt, synthetic construct
  source 1..22: mol_type = other RNA
agaaatcatggaagaaaggtaa

SEQ ID NO: 31938 - RNA, 22 nt, synthetic construct
  source 1..22: mol_type = other RNA
agagaaatcatggaagaaaggt

SEQ ID NO: 31939 - RNA, 22 nt, synthetic construct
  source 1..22: mol_type = other RNA
agatgaaggtcctttttatacc

SEQ ID NO: 31940 - RNA, 22 nt, synthetic construct
  source 1..22: mol_type = other RNA
agatgggtataaaaaggacctt

SEQ ID NO: 31941 - RNA, 22 nt, synthetic construct
  source 1..22: mol_type = other RNA
agcaggtcctaatgtggcagct

SEQ ID NO: 31942 - RNA, 22 nt, synthetic construct
  source 1..22: mol_type = other RNA
agctattagagaaatcatggaa

SEQ ID NO: 31943 - RNA, 22 nt, synthetic construct
  source 1..22: mol_type = other RNA
agctgccacattaggacctgct

SEQ ID NO: 31944 - RNA, 22 nt, synthetic construct
  source 1..22: mol_type = other RNA
aggacctgctcctagatgggta

SEQ ID NO: 31945 - RNA, 22 nt, synthetic construct
  source 1..22: mol_type = other RNA
aggaccttcatctttttcaata

SEQ ID NO: 31946 - RNA, 22 nt, synthetic construct
  source 1..22: mol_type = other RNA
aggagcaggtcctaatgtggca

SEQ ID NO: 31947 - RNA, 22 nt, synthetic construct
  source 1..22: mol_type = other RNA
aggtaattaacgcaaaggcaca

SEQ ID NO: 31948 - RNA, 22 nt, synthetic construct
  source 1..22: mol_type = other RNA
aggtcctaatgtggcagctatt

SEQ ID NO: 31949 - RNA, 22 nt, synthetic construct
  source 1..22: mol_type = other RNA
aggtcctttttatacccatcta

SEQ ID NO: 31950 - RNA, 22 nt, synthetic construct
  source 1..22: mol_type = other RNA
ataaaaaggaccttcatctttt

SEQ ID NO: 31951 - RNA, 22 nt, synthetic construct
  source 1..22: mol_type = other RNA
ataaacgttaatctgccctgtg

SEQ ID NO: 31952 - RNA, 22 nt, synthetic construct
  source 1..22: mol_type = other RNA
ataatttgctctgttgagataa

SEQ ID NO: 31953 - RNA, 22 nt, synthetic construct
  source 1..22: mol_type = other RNA
atacccatctaggagcaggtcc

SEQ ID NO: 31954 - RNA, 22 nt, synthetic construct
  source 1..22: mol_type = other RNA
atagctgccacattaggacctg

SEQ ID NO: 31955 - RNA, 22 nt, synthetic construct
  source 1..22: mol_type = other RNA
atcatggaagaaaggtaattaa

SEQ ID NO: 31956 - RNA, 22 nt, synthetic construct
  source 1..22: mol_type = other RNA
atctaggagcaggtcctaatgt

SEQ ID NO: 31957 - RNA, 22 nt, synthetic construct
  source 1..22: mol_type = other RNA
atctcaacagagcaaattattg

SEQ ID NO: 31958 - RNA, 22 nt, synthetic construct
  source 1..22: mol_type = other RNA
atctgccctgtgcctttgcgtt

SEQ ID NO: 31959 - RNA, 22 nt, synthetic construct
  source 1..22: mol_type = other RNA
atcttctattatctcaacagag

SEQ ID NO: 31960 - RNA, 22 nt, synthetic construct
  source 1..22: mol_type = other RNA
atgaaggtcctttttataccca

SEQ ID NO: 31961 - RNA, 22 nt, synthetic construct
  source 1..22: mol_type = other RNA
atgatttctctaatagctgcca

SEQ ID NO: 31962 - RNA, 22 nt, synthetic construct
  source 1..22: mol_type = other RNA
atggaagaaaggtaattaacgc

SEQ ID NO: 31963 - RNA, 22 nt, synthetic construct
  source 1..22: mol_type = other RNA
atgggtataaaaaggaccttca

SEQ ID NO: 31964 - RNA, 22 nt, synthetic construct
  source 1..22: mol_type = other RNA
atgtggcagctattagagaaat

SEQ ID NO: 31965 - RNA, 22 nt, synthetic construct
  source 1..22: mol_type = other RNA
attaacgcaaaggcacagggca

SEQ ID NO: 31966 - RNA, 22 nt, synthetic construct
  source 1..22: mol_type = other RNA
attacctttcttccatgatttc

SEQ ID NO: 31967 - RNA, 22 nt, synthetic construct
  source 1..22: mol_type = other RNA
attagagaaatcatggaagaaa

SEQ ID NO: 31968 - RNA, 22 nt, synthetic construct
  source 1..22: mol_type = other RNA
attaggacctgctcctagatgg

SEQ ID NO: 31969 - RNA, 22 nt, synthetic construct
  source 1..22: mol_type = other RNA
attatctcaacagagcaaatta

SEQ ID NO: 31970 - RNA, 22 nt, synthetic construct
  source 1..22: mol_type = other RNA
attattgaaaaagatgaaggtc

SEQ ID NO: 31971 - RNA, 22 nt, synthetic construct
  source 1..22: mol_type = other RNA
attgaaaaagatgaaggtcctt

SEQ ID NO: 31972 - RNA, 22 nt, synthetic construct
  source 1..22: mol_type = other RNA
atttctctaatagctgccacat

SEQ ID NO: 31973 - RNA, 22 nt, synthetic construct
  source 1..22: mol_type = other RNA
atttgctctgttgagataatag

SEQ ID NO: 31974 - RNA, 22 nt, synthetic construct
  source 1..22: mol_type = other RNA
caacagagcaaattattgaaaa

SEQ ID NO: 31975 - RNA, 22 nt, synthetic construct
  source 1..22: mol_type = other RNA
caataatttgctctgttgagat

SEQ ID NO: 31976 - RNA, 22 nt, synthetic construct
  source 1..22: mol_type = other RNA
cacattaggacctgctcctaga

SEQ ID NO: 31977 - RNA, 22 nt, synthetic construct
  source 1..22: mol_type = other RNA
cagagcaaattattgaaaaaga

SEQ ID NO: 31978 - RNA, 22 nt, synthetic construct
  source 1..22: mol_type = other RNA
cagctattagagaaatcatgga

SEQ ID NO: 31979 - RNA, 22 nt, synthetic construct
  source 1..22: mol_type = other RNA
caggtcctaatgtggcagctat

SEQ ID NO: 31980 - RNA, 22 nt, synthetic construct
  source 1..22: mol_type = other RNA
catctaggagcaggtcctaatg

SEQ ID NO: 31981 - RNA, 22 nt, synthetic construct
  source 1..22: mol_type = other RNA
catctttttcaataatttgctc

SEQ ID NO: 31982 - RNA, 22 nt, synthetic construct
  source 1..22: mol_type = other RNA
catgatttctctaatagctgcc

SEQ ID NO: 31983 - RNA, 22 nt, synthetic construct
  source 1..22: mol_type = other RNA
catggaagaaaggtaattaacg

SEQ ID NO: 31984 - RNA, 22 nt, synthetic construct
  source 1..22: mol_type = other RNA
cattaggacctgctcctagatg

SEQ ID NO: 31985 - RNA, 22 nt, synthetic construct
  source 1..22: mol_type = other RNA
ccacattaggacctgctcctag

SEQ ID NO: 31986 - RNA, 22 nt, synthetic construct
  source 1..22: mol_type = other RNA
ccatctaggagcaggtcctaat

SEQ ID NO: 31987 - RNA, 22 nt, synthetic construct
  source 1..22: mol_type = other RNA
ccatgatttctctaatagctgc

SEQ ID NO: 31988 - RNA, 22 nt, synthetic construct
  source 1..22: mol_type = other RNA
cccatctaggagcaggtcctaa

SEQ ID NO: 31989 - RNA, 22 nt, synthetic construct
  source 1..22: mol_type = other RNA
ccctgtgcctttgcgttaatta

SEQ ID NO: 31990 - RNA, 22 nt, synthetic construct
  source 1..22: mol_type = other RNA
cctaatgtggcagctattagag

SEQ ID NO: 31991 - RNA, 22 nt, synthetic construct
  source 1..22: mol_type = other RNA
cctagatgggtataaaaaggac

SEQ ID NO: 31992 - RNA, 22 nt, synthetic construct
  source 1..22: mol_type = other RNA
cctgctcctagatgggtataaa

SEQ ID NO: 31993 - RNA, 22 nt, synthetic construct
  source 1..22: mol_type = other RNA
cctgtgcctttgcgttaattac

SEQ ID NO: 31994 - RNA, 22 nt, synthetic construct
  source 1..22: mol_type = other RNA
cctttcttccatgatttctcta

SEQ ID NO: 31995 - RNA, 22 nt, synthetic construct
  source 1..22: mol_type = other RNA
cctttgcgttaattacctttct

SEQ ID NO: 31996 - RNA, 22 nt, synthetic construct
  source 1..22: mol_type = other RNA
cctttttatacccatctaggag

SEQ ID NO: 31997 - RNA, 22 nt, synthetic construct
  source 1..22: mol_type = other RNA
cgcaaaggcacagggcagatta

SEQ ID NO: 31998 - RNA, 22 nt, synthetic construct
  source 1..22: mol_type = other RNA
cgttaatctgccctgtgccttt

SEQ ID NO: 31999 - RNA, 22 nt, synthetic construct
  source 1..22: mol_type = other RNA
cgttaattacctttcttccatg

SEQ ID NO: 32000 - RNA, 22 nt, synthetic construct
  source 1..22: mol_type = other RNA
ctaatagctgccacattaggac

SEQ ID NO: 32001 - RNA, 22 nt, synthetic construct
  source 1..22: mol_type = other RNA
ctaatgtggcagctattagaga

SEQ ID NO: 32002 - RNA, 22 nt, synthetic construct
  source 1..22: mol_type = other RNA
ctagatgggtataaaaaggacc

SEQ ID NO: 32003 - RNA, 22 nt, synthetic construct
  source 1..22: mol_type = other RNA
ctaggagcaggtcctaatgtgg

SEQ ID NO: 32004 - RNA, 22 nt, synthetic construct
  source 1..22: mol_type = other RNA
ctattagagaaatcatggaaga

SEQ ID NO: 32005 - RNA, 22 nt, synthetic construct
  source 1..22: mol_type = other RNA
ctattatctcaacagagcaaat

SEQ ID NO: 32006 - RNA, 22 nt, synthetic construct
  source 1..22: mol_type = other RNA
ctcaacagagcaaattattgaa

SEQ ID NO: 32007 - RNA, 22 nt, synthetic construct
  source 1..22: mol_type = other RNA
ctcctagatgggtataaaaagg

SEQ ID NO: 32008 - RNA, 22 nt, synthetic construct
  source 1..22: mol_type = other RNA
ctctaatagctgccacattagg

SEQ ID NO: 32009 - RNA, 22 nt, synthetic construct
  source 1..22: mol_type = other RNA
ctctgttgagataatagaagat

SEQ ID NO: 32010 - RNA, 22 nt, synthetic construct
  source 1..22: mol_type = other RNA
ctgccacattaggacctgctcc

SEQ ID NO: 32011 - RNA, 22 nt, synthetic construct
  source 1..22: mol_type = other RNA
ctgccctgtgcctttgcgttaa

SEQ ID NO: 32012 - RNA, 22 nt, synthetic construct
  source 1..22: mol_type = other RNA
ctgctcctagatgggtataaaa

SEQ ID NO: 32013 - RNA, 22 nt, synthetic construct
  source 1..22: mol_type = other RNA
ctgtgcctttgcgttaattacc

SEQ ID NO: 32014 - RNA, 22 nt, synthetic construct
  source 1..22: mol_type = other RNA
ctgttgagataatagaagatta

SEQ ID NO: 32015 - RNA, 22 nt, synthetic construct
  source 1..22: mol_type = other RNA
cttccatgatttctctaatagc

SEQ ID NO: 32016 - RNA, 22 nt, synthetic construct
  source 1..22: mol_type = other RNA
cttctattatctcaacagagca

SEQ ID NO: 32017 - RNA, 22 nt, synthetic construct
  source 1..22: mol_type = other RNA
ctttcttccatgatttctctaa

SEQ ID NO: 32018 - RNA, 22 nt, synthetic construct
  source 1..22: mol_type = other RNA
ctttgcgttaattacctttctt

SEQ ID NO: 32019 - RNA, 22 nt, synthetic construct
  source 1..22: mol_type = other RNA
ctttttatacccatctaggagc

SEQ ID NO: 32020 - RNA, 22 nt, synthetic construct
  source 1..22: mol_type = other RNA
ctttttcaataatttgctctgt

SEQ ID NO: 32021 - RNA, 22 nt, synthetic construct
  source 1..22: mol_type = other RNA
gaaaaagatgaaggtccttttt

SEQ ID NO: 32022 - RNA, 22 nt, synthetic construct
  source 1..22: mol_type = other RNA
gaaaggtaattaacgcaaaggc

SEQ ID NO: 32023 - RNA, 22 nt, synthetic construct
  source 1..22: mol_type = other RNA
gaaatcatggaagaaaggtaat

SEQ ID NO: 32024 - RNA, 22 nt, synthetic construct
  source 1..22: mol_type = other RNA
gaagaaaggtaattaacgcaaa

SEQ ID NO: 32025 - RNA, 22 nt, synthetic construct
  source 1..22: mol_type = other RNA
gaaggtcctttttatacccatc

SEQ ID NO: 32026 - RNA, 22 nt, synthetic construct
  source 1..22: mol_type = other RNA
gacctgctcctagatgggtata

SEQ ID NO: 32027 - RNA, 22 nt, synthetic construct
  source 1..22: mol_type = other RNA
gaccttcatctttttcaataat

SEQ ID NO: 32028 - RNA, 22 nt, synthetic construct
  source 1..22: mol_type = other RNA
gagaaatcatggaagaaaggta

SEQ ID NO: 32029 - RNA, 22 nt, synthetic construct
  source 1..22: mol_type = other RNA
gagcaaattattgaaaaagatg

SEQ ID NO: 32030 - RNA, 22 nt, synthetic construct
  source 1..22: mol_type = other RNA
gagcaggtcctaatgtggcagc

SEQ ID NO: 32031 - RNA, 22 nt, synthetic construct
  source 1..22: mol_type = other RNA
gaggtctaaaataataatcttc

SEQ ID NO: 32032 - RNA, 22 nt, synthetic construct
  source 1..22: mol_type = other RNA
gatgaaggtcctttttataccc

SEQ ID NO: 32033 - RNA, 22 nt, synthetic construct
  source 1..22: mol_type = other RNA
gatgggtataaaaaggaccttc

SEQ ID NO: 32034 - RNA, 22 nt, synthetic construct
  source 1..22: mol_type = other RNA
gatttctctaatagctgccaca

SEQ ID NO: 32035 - RNA, 22 nt, synthetic construct
  source 1..22: mol_type = other RNA
gcagctattagagaaatcatgg

SEQ ID NO: 32036 - RNA, 22 nt, synthetic construct
  source 1..22: mol_type = other RNA
gcaggtcctaatgtggcagcta

SEQ ID NO: 32037 - RNA, 22 nt, synthetic construct
  source 1..22: mol_type = other RNA
gccacattaggacctgctccta

SEQ ID NO: 32038 - RNA, 22 nt, synthetic construct
  source 1..22: mol_type = other RNA
gccctgtgcctttgcgttaatt

SEQ ID NO: 32039 - RNA, 22 nt, synthetic construct
  source 1..22: mol_type = other RNA
gcctttgcgttaattacctttc

SEQ ID NO: 32040 - RNA, 22 nt, synthetic construct
  source 1..22: mol_type = other RNA
gcgttaattacctttcttccat

SEQ ID NO: 32041 - RNA, 22 nt, synthetic construct
  source 1..22: mol_type = other RNA
gctattagagaaatcatggaag

SEQ ID NO: 32042 - RNA, 22 nt, synthetic construct
  source 1..22: mol_type = other RNA
gctcctagatgggtataaaaag

SEQ ID NO: 32043 - RNA, 22 nt, synthetic construct
  source 1..22: mol_type = other RNA
gctctgttgagataatagaaga

SEQ ID NO: 32044 - RNA, 22 nt, synthetic construct
  source 1..22: mol_type = other RNA
gctgccacattaggacctgctc

SEQ ID NO: 32045 - RNA, 22 nt, synthetic construct
  source 1..22: mol_type = other RNA
ggaagaaaggtaattaacgcaa

SEQ ID NO: 32046 - RNA, 22 nt, synthetic construct
  source 1..22: mol_type = other RNA
ggacctgctcctagatgggtat

SEQ ID NO: 32047 - RNA, 22 nt, synthetic construct
  source 1..22: mol_type = other RNA
ggaccttcatctttttcaataa

SEQ ID NO: 32048 - RNA, 22 nt, synthetic construct
  source 1..22: mol_type = other RNA
ggagcaggtcctaatgtggcag

SEQ ID NO: 32049 - RNA, 22 nt, synthetic construct
  source 1..22: mol_type = other RNA
ggcagctattagagaaatcatg

SEQ ID NO: 32050 - RNA, 22 nt, synthetic construct
  source 1..22: mol_type = other RNA
gggtataaaaaggaccttcatc

SEQ ID NO: 32051 - RNA, 22 nt, synthetic construct
  source 1..22: mol_type = other RNA
ggtaattaacgcaaaggcacag

SEQ ID NO: 32052 - RNA, 22 nt, synthetic construct
  source 1..22: mol_type = other RNA
ggtataaaaaggaccttcatct

SEQ ID NO: 32053 - RNA, 22 nt, synthetic construct
  source 1..22: mol_type = other RNA
ggtcctaatgtggcagctatta

SEQ ID NO: 32054 - RNA, 22 nt, synthetic construct
  source 1..22: mol_type = other RNA
ggtcctttttatacccatctag

SEQ ID NO: 32055 - RNA, 22 nt, synthetic construct
  source 1..22: mol_type = other RNA
gtaattaacgcaaaggcacagg

SEQ ID NO: 32056 - RNA, 22 nt, synthetic construct
  source 1..22: mol_type = other RNA
gtataaaaaggaccttcatctt

SEQ ID NO: 32057 - RNA, 22 nt, synthetic construct
  source 1..22: mol_type = other RNA
gtcctaatgtggcagctattag

SEQ ID NO: 32058 - RNA, 22 nt, synthetic construct
  source 1..22: mol_type = other RNA
gtcctttttatacccatctagg

SEQ ID NO: 32059 - RNA, 22 nt, synthetic construct
  source 1..22: mol_type = other RNA
gtgcctttgcgttaattacctt

SEQ ID NO: 32060 - RNA, 22 nt, synthetic construct
  source 1..22: mol_type = other RNA
gtggcagctattagagaaatca

SEQ ID NO: 32061 - RNA, 22 nt, synthetic construct
  source 1..22: mol_type = other RNA
gttaatctgccctgtgcctttg

SEQ ID NO: 32062 - RNA, 22 nt, synthetic construct
  source 1..22: mol_type = other RNA
gttaattacctttcttccatga

SEQ ID NO: 32063 - RNA, 22 nt, synthetic construct
  source 1..22: mol_type = other RNA
taaaaaggaccttcatcttttt

SEQ ID NO: 32064 - RNA, 22 nt, synthetic construct
  source 1..22: mol_type = other RNA
taaacgttaatctgccctgtgc

SEQ ID NO: 32065 - RNA, 22 nt, synthetic construct
  source 1..22: mol_type = other RNA
taacgcaaaggcacagggcaga

SEQ ID NO: 32066 - RNA, 22 nt, synthetic construct
  source 1..22: mol_type = other RNA
taatagctgccacattaggacc

SEQ ID NO: 32067 - RNA, 22 nt, synthetic construct
  source 1..22: mol_type = other RNA
taatctgccctgtgcctttgcg

SEQ ID NO: 32068 - RNA, 22 nt, synthetic construct
  source 1..22: mol_type = other RNA
taatcttctattatctcaacag

SEQ ID NO: 32069 - RNA, 22 nt, synthetic construct
  source 1..22: mol_type = other RNA
taatgtggcagctattagagaa

SEQ ID NO: 32070 - RNA, 22 nt, synthetic construct
  source 1..22: mol_type = other RNA
taattaacgcaaaggcacaggg

SEQ ID NO: 32071 - RNA, 22 nt, synthetic construct
  source 1..22: mol_type = other RNA
taattacctttcttccatgatt

SEQ ID NO: 32072 - RNA, 22 nt, synthetic construct
  source 1..22: mol_type = other RNA
taatttgctctgttgagataat

SEQ ID NO: 32073 - RNA, 22 nt, synthetic construct
  source 1..22: mol_type = other RNA
tacccatctaggagcaggtcct

SEQ ID NO: 32074 - RNA, 22 nt, synthetic construct
  source 1..22: mol_type = other RNA
tacctttcttccatgatttctc

SEQ ID NO: 32075 - RNA, 22 nt, synthetic construct
  source 1..22: mol_type = other RNA
tagagaaatcatggaagaaagg

SEQ ID NO: 32076 - RNA, 22 nt, synthetic construct
  source 1..22: mol_type = other RNA
tagatgggtataaaaaggacct

SEQ ID NO: 32077 - RNA, 22 nt, synthetic construct
  source 1..22: mol_type = other RNA
tagctgccacattaggacctgc

SEQ ID NO: 32078 - RNA, 22 nt, synthetic construct
  source 1..22: mol_type = other RNA
taggacctgctcctagatgggt

SEQ ID NO: 32079 - RNA, 22 nt, synthetic construct
  source 1..22: mol_type = other RNA
taggagcaggtcctaatgtggc

SEQ ID NO: 32080 - RNA, 22 nt, synthetic construct
  source 1..22: mol_type = other RNA
tataaaaaggaccttcatcttt

SEQ ID NO: 32081 - RNA, 22 nt, synthetic construct
  source 1..22: mol_type = other RNA
tatacccatctaggagcaggtc

SEQ ID NO: 32082 - RNA, 22 nt, synthetic construct
  source 1..22: mol_type = other RNA
tatctcaacagagcaaattatt

SEQ ID NO: 32083 - RNA, 22 nt, synthetic construct
  source 1..22: mol_type = other RNA
tattagagaaatcatggaagaa

SEQ ID NO: 32084 - RNA, 22 nt, synthetic construct
  source 1..22: mol_type = other RNA
tattatctcaacagagcaaatt

SEQ ID NO: 32085 - RNA, 22 nt, synthetic construct
  source 1..22: mol_type = other RNA
tattgaaaaagatgaaggtcct

SEQ ID NO: 32086 - RNA, 22 nt, synthetic construct
  source 1..22: mol_type = other RNA
tcaacagagcaaattattgaaa

SEQ ID NO: 32087 - RNA, 22 nt, synthetic construct
  source 1..22: mol_type = other RNA
tcaataatttgctctgttgaga

SEQ ID NO: 32088 - RNA, 22 nt, synthetic construct
  source 1..22: mol_type = other RNA
tcatggaagaaaggtaattaac

SEQ ID NO: 32089 - RNA, 22 nt, synthetic construct
  source 1..22: mol_type = other RNA
tccatgatttctctaatagctg

SEQ ID NO: 32090 - RNA, 22 nt, synthetic construct
  source 1..22: mol_type = other RNA
tcctaatgtggcagctattaga

SEQ ID NO: 32091 - RNA, 22 nt, synthetic construct
  source 1..22: mol_type = other RNA
tcctagatgggtataaaaagga

SEQ ID NO: 32092 - RNA, 22 nt, synthetic construct
  source 1..22: mol_type = other RNA
tcctttttatacccatctagga

SEQ ID NO: 32093 - RNA, 22 nt, synthetic construct
  source 1..22: mol_type = other RNA
tctaatagctgccacattagga

SEQ ID NO: 32094 - RNA, 22 nt, synthetic construct
  source 1..22: mol_type = other RNA
tctaggagcaggtcctaatgtg

SEQ ID NO: 32095 - RNA, 22 nt, synthetic construct
  source 1..22: mol_type = other RNA
tctattatctcaacagagcaaa

SEQ ID NO: 32096 - RNA, 22 nt, synthetic construct
  source 1..22: mol_type = other RNA
tctcaacagagcaaattattga

SEQ ID NO: 32097 - RNA, 22 nt, synthetic construct
  source 1..22: mol_type = other RNA
tctctaatagctgccacattag

SEQ ID NO: 32098 - RNA, 22 nt, synthetic construct
  source 1..22: mol_type = other RNA
tctgccctgtgcctttgcgtta

SEQ ID NO: 32099 - RNA, 22 nt, synthetic construct
  source 1..22: mol_type = other RNA
tctgttgagataatagaagatt

SEQ ID NO: 32100 - RNA, 22 nt, synthetic construct
  source 1..22: mol_type = other RNA
tcttccatgatttctctaatag

SEQ ID NO: 32101 - RNA, 22 nt, synthetic construct
  source 1..22: mol_type = other RNA
tcttctattatctcaacagagc

SEQ ID NO: 32102 - RNA, 22 nt, synthetic construct
  source 1..22: mol_type = other RNA
tctttttcaataatttgctctg

SEQ ID NO: 32103 - RNA, 22 nt, synthetic construct
  source 1..22: mol_type = other RNA
tgaaaaagatgaaggtcctttt

SEQ ID NO: 32104 - RNA, 22 nt, synthetic construct
  source 1..22: mol_type = other RNA
tgaaggtcctttttatacccat

SEQ ID NO: 32105 - RNA, 22 nt, synthetic construct
  source 1..22: mol_type = other RNA
tgatttctctaatagctgccac

SEQ ID NO: 32106 - RNA, 22 nt, synthetic construct
  source 1..22: mol_type = other RNA
tgccacattaggacctgctcct

SEQ ID NO: 32107 - RNA, 22 nt, synthetic construct
  source 1..22: mol_type = other RNA
tgccctgtgcctttgcgttaat

SEQ ID NO: 32108 - RNA, 22 nt, synthetic construct
  source 1..22: mol_type = other RNA
tgcctttgcgttaattaccttt

SEQ ID NO: 32109 - RNA, 22 nt, synthetic construct
  source 1..22: mol_type = other RNA
tgcgttaattacctttcttcca

SEQ ID NO: 32110 - RNA, 22 nt, synthetic construct
  source 1..22: mol_type = other RNA
tgctcctagatgggtataaaaa

SEQ ID NO: 32111 - RNA, 22 nt, synthetic construct
  source 1..22: mol_type = other RNA
tgctctgttgagataatagaag

SEQ ID NO: 32112 - RNA, 22 nt, synthetic construct
  source 1..22: mol_type = other RNA
tggaagaaaggtaattaacgca

SEQ ID NO: 32113 - RNA, 22 nt, synthetic construct
  source 1..22: mol_type = other RNA
tggcagctattagagaaatcat

SEQ ID NO: 32114 - RNA, 22 nt, synthetic construct
  source 1..22: mol_type = other RNA
tgggtataaaaaggaccttcat

SEQ ID NO: 32115 - RNA, 22 nt, synthetic construct
  source 1..22: mol_type = other RNA
tgtgcctttgcgttaattacct

SEQ ID NO: 32116 - RNA, 22 nt, synthetic construct
  source 1..22: mol_type = other RNA
tgtggcagctattagagaaatc

SEQ ID NO: 32117 - RNA, 22 nt, synthetic construct
  source 1..22: mol_type = other RNA
ttaacgcaaaggcacagggcag

SEQ ID NO: 32118 - RNA, 22 nt, synthetic construct
  source 1..22: mol_type = other RNA
ttaatctgccctgtgcctttgc

SEQ ID NO: 32119 - RNA, 22 nt, synthetic construct
  source 1..22: mol_type = other RNA
ttaattacctttcttccatgat

SEQ ID NO: 32120 - RNA, 22 nt, synthetic construct
  source 1..22: mol_type = other RNA
ttacctttcttccatgatttct

SEQ ID NO: 32121 - RNA, 22 nt, synthetic construct
  source 1..22: mol_type = other RNA
ttagagaaatcatggaagaaag

SEQ ID NO: 32122 - RNA, 22 nt, synthetic construct
  source 1..22: mol_type = other RNA
ttaggacctgctcctagatggg

SEQ ID NO: 32123 - RNA, 22 nt, synthetic construct
  source 1..22: mol_type = other RNA
ttatacccatctaggagcaggt

SEQ ID NO: 32124 - RNA, 22 nt, synthetic construct
  source 1..22: mol_type = other RNA
ttatctcaacagagcaaattat

SEQ ID NO: 32125 - RNA, 22 nt, synthetic construct
  source 1..22: mol_type = other RNA
ttattgaaaaagatgaaggtcc

SEQ ID NO: 32126 - RNA, 22 nt, synthetic construct
  source 1..22: mol_type = other RNA
ttcaataatttgctctgttgag

SEQ ID NO: 32127 - RNA, 22 nt, synthetic construct
  source 1..22: mol_type = other RNA
ttccatgatttctctaatagct

SEQ ID NO: 32128 - RNA, 22 nt, synthetic construct
  source 1..22: mol_type = other RNA
ttctattatctcaacagagcaa

SEQ ID NO: 32129 - RNA, 22 nt, synthetic construct
  source 1..22: mol_type = other RNA
ttctctaatagctgccacatta

SEQ ID NO: 32130 - RNA, 22 nt, synthetic construct
  source 1..22: mol_type = other RNA
ttcttccatgatttctctaata

SEQ ID NO: 32131 - RNA, 22 nt, synthetic construct
  source 1..22: mol_type = other RNA
ttgaaaaagatgaaggtccttt

SEQ ID NO: 32132 - RNA, 22 nt, synthetic construct
  source 1..22: mol_type = other RNA
ttgcgttaattacctttcttcc

SEQ ID NO: 32133 - RNA, 22 nt, synthetic construct
  source 1..22: mol_type = other RNA
ttgctctgttgagataatagaa

SEQ ID NO: 32134 - RNA, 22 nt, synthetic construct
  source 1..22: mol_type = other RNA
tttatacccatctaggagcagg

SEQ ID NO: 32135 - RNA, 22 nt, synthetic construct
  source 1..22: mol_type = other RNA
tttcaataatttgctctgttga

SEQ ID NO: 32136 - RNA, 22 nt, synthetic construct
  source 1..22: mol_type = other RNA
tttctctaatagctgccacatt

SEQ ID NO: 32137 - RNA, 22 nt, synthetic construct
  source 1..22: mol_type = other RNA
tttcttccatgatttctctaat

SEQ ID NO: 32138 - RNA, 22 nt, synthetic construct
  source 1..22: mol_type = other RNA
tttgcgttaattacctttcttc

SEQ ID NO: 32139 - RNA, 22 nt, synthetic construct
  source 1..22: mol_type = other RNA
tttgctctgttgagataataga

SEQ ID NO: 32140 - RNA, 22 nt, synthetic construct
  source 1..22: mol_type = other RNA
ttttatacccatctaggagcag

SEQ ID NO: 32141 - RNA, 22 nt, synthetic construct
  source 1..22: mol_type = other RNA
ttttcaataatttgctctgttg

SEQ ID NO: 32142 - RNA, 22 nt, synthetic construct
  source 1..22: mol_type = other RNA
tttttatacccatctaggagca

SEQ ID NO: 32143 - RNA, 20 nt, synthetic construct
  source 1..20: mol_type = other RNA
aaaagttctcagggatgtcc

SEQ ID NO: 32144 - RNA, 20 nt, synthetic construct
  source 1..20: mol_type = other RNA
aaacccacagaaacacacac

SEQ ID NO: 32145 - RNA, 20 nt, synthetic construct
  source 1..20: mol_type = other RNA
aaaccttaaagaaacccaca

SEQ ID NO: 32146 - RNA, 20 nt, synthetic construct
  source 1..20: mol_type = other RNA
aaagaaacccacagaaacac

SEQ ID NO: 32147 - RNA, 20 nt, synthetic construct
  source 1..20: mol_type = other RNA
aaagaaggcaaaagttctca

SEQ ID NO: 32148 - RNA, 20 nt, synthetic construct
  source 1..20: mol_type = other RNA
aaagagtcatctatactggt

SEQ ID NO: 32149 - RNA, 20 nt, synthetic construct
  source 1..20: mol_type = other RNA
aaagctattaggattgaaag

SEQ ID NO: 32150 - RNA, 20 nt, synthetic construct
  source 1..20: mol_type = other RNA
aaaggctttatcaagtcaca

SEQ ID NO: 32151 - RNA, 20 nt, synthetic construct
  source 1..20: mol_type = other RNA
aaagttctcagggatgtcct

SEQ ID NO: 32152 - RNA, 20 nt, synthetic construct
  source 1..20: mol_type = other RNA
aacccacagaaacacacaca

SEQ ID NO: 32153 - RNA, 20 nt, synthetic construct
  source 1..20: mol_type = other RNA
aaccttaaagaaacccacag

SEQ ID NO: 32154 - RNA, 20 nt, synthetic construct
  source 1..20: mol_type = other RNA
aacttttgccttctttacca

SEQ ID NO: 32155 - RNA, 20 nt, synthetic construct
  source 1..20: mol_type = other RNA
aagaaacccacagaaacaca

SEQ ID NO: 32156 - RNA, 20 nt, synthetic construct
  source 1..20: mol_type = other RNA
aagaaggcaaaagttctcag

SEQ ID NO: 32157 - RNA, 20 nt, synthetic construct
  source 1..20: mol_type = other RNA
aagaccaaaggctttatcaa

SEQ ID NO: 32158 - RNA, 20 nt, synthetic construct
  source 1..20: mol_type = other RNA
aagagtcatctatactggta

SEQ ID NO: 32159 - RNA, 20 nt, synthetic construct
  source 1..20: mol_type = other RNA
aagatttaagaccaaaggct

SEQ ID NO: 32160 - RNA, 20 nt, synthetic construct
  source 1..20: mol_type = other RNA
aagctattaggattgaaaga

SEQ ID NO: 32161 - RNA, 20 nt, synthetic construct
  source 1..20: mol_type = other RNA
aaggcaaaagttctcaggga

SEQ ID NO: 32162 - RNA, 20 nt, synthetic construct
  source 1..20: mol_type = other RNA
aaggctttatcaagtcacac

SEQ ID NO: 32163 - RNA, 20 nt, synthetic construct
  source 1..20: mol_type = other RNA
aagggtaaagctattaggat

SEQ ID NO: 32164 - RNA, 20 nt, synthetic construct
  source 1..20: mol_type = other RNA
aaggtttggacagaagggta

SEQ ID NO: 32165 - RNA, 20 nt, synthetic construct
  source 1..20: mol_type = other RNA
aagtcacacttacccactta

SEQ ID NO: 32166 - RNA, 20 nt, synthetic construct
  source 1..20: mol_type = other RNA
aagtgggtaagtgtgacttg

SEQ ID NO: 32167 - RNA, 20 nt, synthetic construct
  source 1..20: mol_type = other RNA
aagtgtgacttgataaagcc

SEQ ID NO: 32168 - RNA, 20 nt, synthetic construct
  source 1..20: mol_type = other RNA
aagttctcagggatgtccta

SEQ ID NO: 32169 - RNA, 20 nt, synthetic construct
  source 1..20: mol_type = other RNA
aatagctttacccttctgtc

SEQ ID NO: 32170 - RNA, 20 nt, synthetic construct
  source 1..20: mol_type = other RNA
aataggacatccctgagaac

SEQ ID NO: 32171 - RNA, 20 nt, synthetic construct
  source 1..20: mol_type = other RNA
aatcctaatagctttaccct

SEQ ID NO: 32172 - RNA, 20 nt, synthetic construct
  source 1..20: mol_type = other RNA
aattgtatgtgtgtgtgttt

SEQ ID NO: 32173 - RNA, 20 nt, synthetic construct
  source 1..20: mol_type = other RNA
acacttacccacttagcaat

SEQ ID NO: 32174 - RNA, 20 nt, synthetic construct
  source 1..20: mol_type = other RNA
acagaagggtaaagctatta

SEQ ID NO: 32175 - RNA, 20 nt, synthetic construct
  source 1..20: mol_type = other RNA
acatccctgagaacttttgc

SEQ ID NO: 32176 - RNA, 20 nt, synthetic construct
  source 1..20: mol_type = other RNA
accaaaggctttatcaagtc

SEQ ID NO: 32177 - RNA, 20 nt, synthetic construct
  source 1..20: mol_type = other RNA
accagtatagatgactcttt

SEQ ID NO: 32178 - RNA, 20 nt, synthetic construct
  source 1..20: mol_type = other RNA
acccacagaaacacacacac

SEQ ID NO: 32179 - RNA, 20 nt, synthetic construct
  source 1..20: mol_type = other RNA
acccacttagcaataggaca

SEQ ID NO: 32180 - RNA, 20 nt, synthetic construct
  source 1..20: mol_type = other RNA
acccttctgtccaaacctta

SEQ ID NO: 32181 - RNA, 20 nt, synthetic construct
  source 1..20: mol_type = other RNA
accttaaagaaacccacaga

SEQ ID NO: 32182 - RNA, 20 nt, synthetic construct
  source 1..20: mol_type = other RNA
actctttcaatcctaatagc

SEQ ID NO: 32183 - RNA, 20 nt, synthetic construct
  source 1..20: mol_type = other RNA
actggtaaagaaggcaaaag

SEQ ID NO: 32184 - RNA, 20 nt, synthetic construct
  source 1..20: mol_type = other RNA
acttacccacttagcaatag

SEQ ID NO: 32185 - RNA, 20 nt, synthetic construct
  source 1..20: mol_type = other RNA
acttagcaataggacatccc

SEQ ID NO: 32186 - RNA, 20 nt, synthetic construct
  source 1..20: mol_type = other RNA
acttgataaagcctttggtc

SEQ ID NO: 32187 - RNA, 20 nt, synthetic construct
  source 1..20: mol_type = other RNA
acttttgccttctttaccag

SEQ ID NO: 32188 - RNA, 20 nt, synthetic construct
  source 1..20: mol_type = other RNA
agaaacccacagaaacacac

SEQ ID NO: 32189 - RNA, 20 nt, synthetic construct
  source 1..20: mol_type = other RNA
agaacttttgccttctttac

SEQ ID NO: 32190 - RNA, 20 nt, synthetic construct
  source 1..20: mol_type = other RNA
agaaggcaaaagttctcagg

SEQ ID NO: 32191 - RNA, 20 nt, synthetic construct
  source 1..20: mol_type = other RNA
agaagggtaaagctattagg

SEQ ID NO: 32192 - RNA, 20 nt, synthetic construct
  source 1..20: mol_type = other RNA
agaccaaaggctttatcaag

SEQ ID NO: 32193 - RNA, 20 nt, synthetic construct
  source 1..20: mol_type = other RNA
agagtcatctatactggtaa

SEQ ID NO: 32194 - RNA, 20 nt, synthetic construct
  source 1..20: mol_type = other RNA
agatgactctttcaatccta

SEQ ID NO: 32195 - RNA, 20 nt, synthetic construct
  source 1..20: mol_type = other RNA
agatttaagaccaaaggctt

SEQ ID NO: 32196 - RNA, 20 nt, synthetic construct
  source 1..20: mol_type = other RNA
agcaataggacatccctgag

SEQ ID NO: 32197 - RNA, 20 nt, synthetic construct
  source 1..20: mol_type = other RNA
agctattaggattgaaagag

SEQ ID NO: 32198 - RNA, 20 nt, synthetic construct
  source 1..20: mol_type = other RNA
agctttacccttctgtccaa

SEQ ID NO: 32199 - RNA, 20 nt, synthetic construct
  source 1..20: mol_type = other RNA
aggacatccctgagaacttt

SEQ ID NO: 32200 - RNA, 20 nt, synthetic construct
  source 1..20: mol_type = other RNA
aggattgaaagagtcatcta

SEQ ID NO: 32201 - RNA, 20 nt, synthetic construct
  source 1..20: mol_type = other RNA
aggcaaaagttctcagggat

SEQ ID NO: 32202 - RNA, 20 nt, synthetic construct
  source 1..20: mol_type = other RNA
aggctttatcaagtcacact

SEQ ID NO: 32203 - RNA, 20 nt, synthetic construct
  source 1..20: mol_type = other RNA
agggatgtcctattgctaag

SEQ ID NO: 32204 - RNA, 20 nt, synthetic construct
  source 1..20: mol_type = other RNA
agggtaaagctattaggatt

SEQ ID NO: 32205 - RNA, 20 nt, synthetic construct
  source 1..20: mol_type = other RNA
aggtttggacagaagggtaa

SEQ ID NO: 32206 - RNA, 20 nt, synthetic construct
  source 1..20: mol_type = other RNA
agtatagatgactctttcaa

SEQ ID NO: 32207 - RNA, 20 nt, synthetic construct
  source 1..20: mol_type = other RNA
agtcacacttacccacttag

SEQ ID NO: 32208 - RNA, 20 nt, synthetic construct
  source 1..20: mol_type = other RNA
agtcatctatactggtaaag

SEQ ID NO: 32209 - RNA, 20 nt, synthetic construct
  source 1..20: mol_type = other RNA
agtgggtaagtgtgacttga

SEQ ID NO: 32210 - RNA, 20 nt, synthetic construct
  source 1..20: mol_type = other RNA
agtgtgacttgataaagcct

SEQ ID NO: 32211 - RNA, 20 nt, synthetic construct
  source 1..20: mol_type = other RNA
agttctcagggatgtcctat

SEQ ID NO: 32212 - RNA, 20 nt, synthetic construct
  source 1..20: mol_type = other RNA
atactggtaaagaaggcaaa

SEQ ID NO: 32213 - RNA, 20 nt, synthetic construct
  source 1..20: mol_type = other RNA
atagatgactctttcaatcc

SEQ ID NO: 32214 - RNA, 20 nt, synthetic construct
  source 1..20: mol_type = other RNA
atagctttacccttctgtcc

SEQ ID NO: 32215 - RNA, 20 nt, synthetic construct
  source 1..20: mol_type = other RNA
ataggacatccctgagaact

SEQ ID NO: 32216 - RNA, 20 nt, synthetic construct
  source 1..20: mol_type = other RNA
atcaagtcacacttacccac

SEQ ID NO: 32217 - RNA, 20 nt, synthetic construct
  source 1..20: mol_type = other RNA
atccctgagaacttttgcct

SEQ ID NO: 32218 - RNA, 20 nt, synthetic construct
  source 1..20: mol_type = other RNA
atcctaatagctttaccctt

SEQ ID NO: 32219 - RNA, 20 nt, synthetic construct
  source 1..20: mol_type = other RNA
atctatactggtaaagaagg

SEQ ID NO: 32220 - RNA, 20 nt, synthetic construct
  source 1..20: mol_type = other RNA
atgactctttcaatcctaat

SEQ ID NO: 32221 - RNA, 20 nt, synthetic construct
  source 1..20: mol_type = other RNA
atgtcctattgctaagtggg

SEQ ID NO: 32222 - RNA, 20 nt, synthetic construct
  source 1..20: mol_type = other RNA
atgtgtgtgtgtttctgtgg

SEQ ID NO: 32223 - RNA, 20 nt, synthetic construct
  source 1..20: mol_type = other RNA
attaggattgaaagagtcat

SEQ ID NO: 32224 - RNA, 20 nt, synthetic construct
  source 1..20: mol_type = other RNA
attgaaagagtcatctatac

SEQ ID NO: 32225 - RNA, 20 nt, synthetic construct
  source 1..20: mol_type = other RNA
attgctaagtgggtaagtgt

SEQ ID NO: 32226 - RNA, 20 nt, synthetic construct
  source 1..20: mol_type = other RNA
attgtatgtgtgtgtgtttc

SEQ ID NO: 32227 - RNA, 20 nt, synthetic construct
  source 1..20: mol_type = other RNA
atttaagaccaaaggcttta

SEQ ID NO: 32228 - RNA, 20 nt, synthetic construct
  source 1..20: mol_type = other RNA
caaaagttctcagggatgtc

SEQ ID NO: 32229 - RNA, 20 nt, synthetic construct
  source 1..20: mol_type = other RNA
caaaccttaaagaaacccac

SEQ ID NO: 32230 - RNA, 20 nt, synthetic construct
  source 1..20: mol_type = other RNA
caaaggctttatcaagtcac

SEQ ID NO: 32231 - RNA, 20 nt, synthetic construct
  source 1..20: mol_type = other RNA
caagtcacacttacccactt

SEQ ID NO: 32232 - RNA, 20 nt, synthetic construct
  source 1..20: mol_type = other RNA
caataggacatccctgagaa

SEQ ID NO: 32233 - RNA, 20 nt, synthetic construct
  source 1..20: mol_type = other RNA
caatcctaatagctttaccc

SEQ ID NO: 32234 - RNA, 20 nt, synthetic construct
  source 1..20: mol_type = other RNA
cacacttacccacttagcaa

SEQ ID NO: 32235 - RNA, 20 nt, synthetic construct
  source 1..20: mol_type = other RNA
cacttacccacttagcaata

SEQ ID NO: 32236 - RNA, 20 nt, synthetic construct
  source 1..20: mol_type = other RNA
cacttagcaataggacatcc

SEQ ID NO: 32237 - RNA, 20 nt, synthetic construct
  source 1..20: mol_type = other RNA
cagaagggtaaagctattag

SEQ ID NO: 32238 - RNA, 20 nt, synthetic construct
  source 1..20: mol_type = other RNA
cagggatgtcctattgctaa

SEQ ID NO: 32239 - RNA, 20 nt, synthetic construct
  source 1..20: mol_type = other RNA
cagtatagatgactctttca

SEQ ID NO: 32240 - RNA, 20 nt, synthetic construct
  source 1..20: mol_type = other RNA
catccctgagaacttttgcc

SEQ ID NO: 32241 - RNA, 20 nt, synthetic construct
  source 1..20: mol_type = other RNA
catctatactggtaaagaag

SEQ ID NO: 32242 - RNA, 20 nt, synthetic construct
  source 1..20: mol_type = other RNA
ccaaaccttaaagaaaccca

SEQ ID NO: 32243 - RNA, 20 nt, synthetic construct
  source 1..20: mol_type = other RNA
ccaaaggctttatcaagtca

SEQ ID NO: 32244 - RNA, 20 nt, synthetic construct
  source 1..20: mol_type = other RNA
ccacagaaacacacacacat

SEQ ID NO: 32245 - RNA, 20 nt, synthetic construct
  source 1..20: mol_type = other RNA
ccacttagcaataggacatc

SEQ ID NO: 32246 - RNA, 20 nt, synthetic construct
  source 1..20: mol_type = other RNA
ccagtatagatgactctttc

SEQ ID NO: 32247 - RNA, 20 nt, synthetic construct
  source 1..20: mol_type = other RNA
cccacagaaacacacacaca

SEQ ID NO: 32248 - RNA, 20 nt, synthetic construct
  source 1..20: mol_type = other RNA
cccacttagcaataggacat

SEQ ID NO: 32249 - RNA, 20 nt, synthetic construct
  source 1..20: mol_type = other RNA
ccctgagaacttttgccttc

SEQ ID NO: 32250 - RNA, 20 nt, synthetic construct
  source 1..20: mol_type = other RNA
cccttctgtccaaaccttaa

SEQ ID NO: 32251 - RNA, 20 nt, synthetic construct
  source 1..20: mol_type = other RNA
cctaatagctttacccttct

SEQ ID NO: 32252 - RNA, 20 nt, synthetic construct
  source 1..20: mol_type = other RNA
cctattgctaagtgggtaag

SEQ ID NO: 32253 - RNA, 20 nt, synthetic construct
  source 1..20: mol_type = other RNA
cctgagaacttttgccttct

SEQ ID NO: 32254 - RNA, 20 nt, synthetic construct
  source 1..20: mol_type = other RNA
ccttaaagaaacccacagaa

SEQ ID NO: 32255 - RNA, 20 nt, synthetic construct
  source 1..20: mol_type = other RNA
ccttctgtccaaaccttaaa

SEQ ID NO: 32256 - RNA, 20 nt, synthetic construct
  source 1..20: mol_type = other RNA
ccttctttaccagtatagat

SEQ ID NO: 32257 - RNA, 20 nt, synthetic construct
  source 1..20: mol_type = other RNA
ctaagtgggtaagtgtgact

SEQ ID NO: 32258 - RNA, 20 nt, synthetic construct
  source 1..20: mol_type = other RNA
ctaatagctttacccttctg

SEQ ID NO: 32259 - RNA, 20 nt, synthetic construct
  source 1..20: mol_type = other RNA
ctaattgtatgtgtgtgtgt

SEQ ID NO: 32260 - RNA, 20 nt, synthetic construct
  source 1..20: mol_type = other RNA
ctatactggtaaagaaggca

SEQ ID NO: 32261 - RNA, 20 nt, synthetic construct
  source 1..20: mol_type = other RNA
ctattaggattgaaagagtc

SEQ ID NO: 32262 - RNA, 20 nt, synthetic construct
  source 1..20: mol_type = other RNA
ctattgctaagtgggtaagt

SEQ ID NO: 32263 - RNA, 20 nt, synthetic construct
  source 1..20: mol_type = other RNA
ctcagggatgtcctattgct

SEQ ID NO: 32264 - RNA, 20 nt, synthetic construct
  source 1..20: mol_type = other RNA
ctctttcaatcctaatagct

SEQ ID NO: 32265 - RNA, 20 nt, synthetic construct
  source 1..20: mol_type = other RNA
ctgagaacttttgccttctt

SEQ ID NO: 32266 - RNA, 20 nt, synthetic construct
  source 1..20: mol_type = other RNA
ctggtaaagaaggcaaaagt

SEQ ID NO: 32267 - RNA, 20 nt, synthetic construct
  source 1..20: mol_type = other RNA
ctgtccaaaccttaaagaaa

SEQ ID NO: 32268 - RNA, 20 nt, synthetic construct
  source 1..20: mol_type = other RNA
ctgtgggtttctttaaggtt

SEQ ID NO: 32269 - RNA, 20 nt, synthetic construct
  source 1..20: mol_type = other RNA
cttaaagaaacccacagaaa

SEQ ID NO: 32270 - RNA, 20 nt, synthetic construct
  source 1..20: mol_type = other RNA
cttacccacttagcaatagg

SEQ ID NO: 32271 - RNA, 20 nt, synthetic construct
  source 1..20: mol_type = other RNA
cttagcaataggacatccct

SEQ ID NO: 32272 - RNA, 20 nt, synthetic construct
  source 1..20: mol_type = other RNA
cttctgtccaaaccttaaag

SEQ ID NO: 32273 - RNA, 20 nt, synthetic construct
  source 1..20: mol_type = other RNA
cttctttaccagtatagatg

SEQ ID NO: 32274 - RNA, 20 nt, synthetic construct
  source 1..20: mol_type = other RNA
cttgataaagcctttggtct

SEQ ID NO: 32275 - RNA, 20 nt, synthetic construct
  source 1..20: mol_type = other RNA
ctttaaggtttggacagaag

SEQ ID NO: 32276 - RNA, 20 nt, synthetic construct
  source 1..20: mol_type = other RNA
ctttaccagtatagatgact

SEQ ID NO: 32277 - RNA, 20 nt, synthetic construct
  source 1..20: mol_type = other RNA
ctttacccttctgtccaaac

SEQ ID NO: 32278 - RNA, 20 nt, synthetic construct
  source 1..20: mol_type = other RNA
ctttatcaagtcacacttac

SEQ ID NO: 32279 - RNA, 20 nt, synthetic construct
  source 1..20: mol_type = other RNA
ctttcaatcctaatagcttt

SEQ ID NO: 32280 - RNA, 20 nt, synthetic construct
  source 1..20: mol_type = other RNA
cttttgccttctttaccagt

SEQ ID NO: 32281 - RNA, 20 nt, synthetic construct
  source 1..20: mol_type = other RNA
gaaacccacagaaacacaca

SEQ ID NO: 32282 - RNA, 20 nt, synthetic construct
  source 1..20: mol_type = other RNA
gaaagagtcatctatactgg

SEQ ID NO: 32283 - RNA, 20 nt, synthetic construct
  source 1..20: mol_type = other RNA
gaacttttgccttctttacc

SEQ ID NO: 32284 - RNA, 20 nt, synthetic construct
  source 1..20: mol_type = other RNA
gaaggcaaaagttctcaggg

SEQ ID NO: 32285 - RNA, 20 nt, synthetic construct
  source 1..20: mol_type = other RNA
gaagggtaaagctattagga

SEQ ID NO: 32286 - RNA, 20 nt, synthetic construct
  source 1..20: mol_type = other RNA
gacagaagggtaaagctatt

SEQ ID NO: 32287 - RNA, 20 nt, synthetic construct
  source 1..20: mol_type = other RNA
gacatccctgagaacttttg

SEQ ID NO: 32288 - RNA, 20 nt, synthetic construct
  source 1..20: mol_type = other RNA
gaccaaaggctttatcaagt

SEQ ID NO: 32289 - RNA, 20 nt, synthetic construct
  source 1..20: mol_type = other RNA
gactctttcaatcctaatag

SEQ ID NO: 32290 - RNA, 20 nt, synthetic construct
  source 1..20: mol_type = other RNA
gacttgataaagcctttggt

SEQ ID NO: 32291 - RNA, 20 nt, synthetic construct
  source 1..20: mol_type = other RNA
gagaacttttgccttcttta

SEQ ID NO: 32292 - RNA, 20 nt, synthetic construct
  source 1..20: mol_type = other RNA
gagtcatctatactggtaaa

SEQ ID NO: 32293 - RNA, 20 nt, synthetic construct
  source 1..20: mol_type = other RNA
gatgactctttcaatcctaa

SEQ ID NO: 32294 - RNA, 20 nt, synthetic construct
  source 1..20: mol_type = other RNA
gatgtcctattgctaagtgg

SEQ ID NO: 32295 - RNA, 20 nt, synthetic construct
  source 1..20: mol_type = other RNA
gattgaaagagtcatctata

SEQ ID NO: 32296 - RNA, 20 nt, synthetic construct
  source 1..20: mol_type = other RNA
gatttaagaccaaaggcttt

SEQ ID NO: 32297 - RNA, 20 nt, synthetic construct
  source 1..20: mol_type = other RNA
gcaaaagttctcagggatgt

SEQ ID NO: 32298 - RNA, 20 nt, synthetic construct
  source 1..20: mol_type = other RNA
gcaataggacatccctgaga

SEQ ID NO: 32299 - RNA, 20 nt, synthetic construct
  source 1..20: mol_type = other RNA
gccttctttaccagtataga

SEQ ID NO: 32300 - RNA, 20 nt, synthetic construct
  source 1..20: mol_type = other RNA
gctaagtgggtaagtgtgac

SEQ ID NO: 32301 - RNA, 20 nt, synthetic construct
  source 1..20: mol_type = other RNA
gctattaggattgaaagagt

SEQ ID NO: 32302 - RNA, 20 nt, synthetic construct
  source 1..20: mol_type = other RNA
gctttacccttctgtccaaa

SEQ ID NO: 32303 - RNA, 20 nt, synthetic construct
  source 1..20: mol_type = other RNA
gctttatcaagtcacactta

SEQ ID NO: 32304 - RNA, 20 nt, synthetic construct
  source 1..20: mol_type = other RNA
ggacagaagggtaaagctat

SEQ ID NO: 32305 - RNA, 20 nt, synthetic construct
  source 1..20: mol_type = other RNA
ggacatccctgagaactttt

SEQ ID NO: 32306 - RNA, 20 nt, synthetic construct
  source 1..20: mol_type = other RNA
ggatgtcctattgctaagtg

SEQ ID NO: 32307 - RNA, 20 nt, synthetic construct
  source 1..20: mol_type = other RNA
ggattgaaagagtcatctat

SEQ ID NO: 32308 - RNA, 20 nt, synthetic construct
  source 1..20: mol_type = other RNA
ggcaaaagttctcagggatg

SEQ ID NO: 32309 - RNA, 20 nt, synthetic construct
  source 1..20: mol_type = other RNA
ggctttatcaagtcacactt

SEQ ID NO: 32310 - RNA, 20 nt, synthetic construct
  source 1..20: mol_type = other RNA
gggatgtcctattgctaagt

SEQ ID NO: 32311 - RNA, 20 nt, synthetic construct
  source 1..20: mol_type = other RNA
gggtaaagctattaggattg

SEQ ID NO: 32312 - RNA, 20 nt, synthetic construct
  source 1..20: mol_type = other RNA
gggtaagtgtgacttgataa

SEQ ID NO: 32313 - RNA, 20 nt, synthetic construct
  source 1..20: mol_type = other RNA
gggtttctttaaggtttgga

SEQ ID NO: 32314 - RNA, 20 nt, synthetic construct
  source 1..20: mol_type = other RNA
ggtaaagaaggcaaaagttc

SEQ ID NO: 32315 - RNA, 20 nt, synthetic construct
  source 1..20: mol_type = other RNA
ggtaaagctattaggattga

SEQ ID NO: 32316 - RNA, 20 nt, synthetic construct
  source 1..20: mol_type = other RNA
ggtaagtgtgacttgataaa

SEQ ID NO: 32317 - RNA, 20 nt, synthetic construct
  source 1..20: mol_type = other RNA
ggtttctttaaggtttggac

SEQ ID NO: 32318 - RNA, 20 nt, synthetic construct
  source 1..20: mol_type = other RNA
ggtttggacagaagggtaaa

SEQ ID NO: 32319 - RNA, 20 nt, synthetic construct
  source 1..20: mol_type = other RNA
gtaaagaaggcaaaagttct

SEQ ID NO: 32320 - RNA, 20 nt, synthetic construct
  source 1..20: mol_type = other RNA
gtaaagctattaggattgaa

SEQ ID NO: 32321 - RNA, 20 nt, synthetic construct
  source 1..20: mol_type = other RNA
gtaagtgtgacttgataaag

SEQ ID NO: 32322 - RNA, 20 nt, synthetic construct
  source 1..20: mol_type = other RNA
gtatagatgactctttcaat

SEQ ID NO: 32323 - RNA, 20 nt, synthetic construct
  source 1..20: mol_type = other RNA
gtatgtgtgtgtgtttctgt

SEQ ID NO: 32324 - RNA, 20 nt, synthetic construct
  source 1..20: mol_type = other RNA
gtcacacttacccacttagc

SEQ ID NO: 32325 - RNA, 20 nt, synthetic construct
  source 1..20: mol_type = other RNA
gtcatctatactggtaaaga

SEQ ID NO: 32326 - RNA, 20 nt, synthetic construct
  source 1..20: mol_type = other RNA
gtccaaaccttaaagaaacc

SEQ ID NO: 32327 - RNA, 20 nt, synthetic construct
  source 1..20: mol_type = other RNA
gtcctattgctaagtgggta

SEQ ID NO: 32328 - RNA, 20 nt, synthetic construct
  source 1..20: mol_type = other RNA
gtgacttgataaagcctttg

SEQ ID NO: 32329 - RNA, 20 nt, synthetic construct
  source 1..20: mol_type = other RNA
gtgggtaagtgtgacttgat

SEQ ID NO: 32330 - RNA, 20 nt, synthetic construct
  source 1..20: mol_type = other RNA
gtgggtttctttaaggtttg

SEQ ID NO: 32331 - RNA, 20 nt, synthetic construct
  source 1..20: mol_type = other RNA
gtgtgacttgataaagcctt

SEQ ID NO: 32332 - RNA, 20 nt, synthetic construct
  source 1..20: mol_type = other RNA
gtgtgtgtgtttctgtgggt

SEQ ID NO: 32333 - RNA, 20 nt, synthetic construct
  source 1..20: mol_type = other RNA
gtgtgtgtttctgtgggttt

SEQ ID NO: 32334 - RNA, 20 nt, synthetic construct
  source 1..20: mol_type = other RNA
gtgtgtttctgtgggtttct

SEQ ID NO: 32335 - RNA, 20 nt, synthetic construct
  source 1..20: mol_type = other RNA
gtgtttctgtgggtttcttt

SEQ ID NO: 32336 - RNA, 20 nt, synthetic construct
  source 1..20: mol_type = other RNA
gttctcagggatgtcctatt

SEQ ID NO: 32337 - RNA, 20 nt, synthetic construct
  source 1..20: mol_type = other RNA
gtttctgtgggtttctttaa

SEQ ID NO: 32338 - RNA, 20 nt, synthetic construct
  source 1..20: mol_type = other RNA
gtttctttaaggtttggaca

SEQ ID NO: 32339 - RNA, 20 nt, synthetic construct
  source 1..20: mol_type = other RNA
gtttggacagaagggtaaag

SEQ ID NO: 32340 - RNA, 20 nt, synthetic construct
  source 1..20: mol_type = other RNA
taaagaaacccacagaaaca

SEQ ID NO: 32341 - RNA, 20 nt, synthetic construct
  source 1..20: mol_type = other RNA
taaagaaggcaaaagttctc

SEQ ID NO: 32342 - RNA, 20 nt, synthetic construct
  source 1..20: mol_type = other RNA
taaagctattaggattgaaa

SEQ ID NO: 32343 - RNA, 20 nt, synthetic construct
  source 1..20: mol_type = other RNA
taagaccaaaggctttatca

SEQ ID NO: 32344 - RNA, 20 nt, synthetic construct
  source 1..20: mol_type = other RNA
taaggtttggacagaagggt

SEQ ID NO: 32345 - RNA, 20 nt, synthetic construct
  source 1..20: mol_type = other RNA
taagtgggtaagtgtgactt

SEQ ID NO: 32346 - RNA, 20 nt, synthetic construct
  source 1..20: mol_type = other RNA
taagtgtgacttgataaagc

SEQ ID NO: 32347 - RNA, 20 nt, synthetic construct
  source 1..20: mol_type = other RNA
taatagctttacccttctgt

SEQ ID NO: 32348 - RNA, 20 nt, synthetic construct
  source 1..20: mol_type = other RNA
taattgtatgtgtgtgtgtt

SEQ ID NO: 32349 - RNA, 20 nt, synthetic construct
  source 1..20: mol_type = other RNA
taccagtatagatgactctt

SEQ ID NO: 32350 - RNA, 20 nt, synthetic construct
  source 1..20: mol_type = other RNA
tacccacttagcaataggac

SEQ ID NO: 32351 - RNA, 20 nt, synthetic construct
  source 1..20: mol_type = other RNA
tacccttctgtccaaacctt

SEQ ID NO: 32352 - RNA, 20 nt, synthetic construct
  source 1..20: mol_type = other RNA
tactggtaaagaaggcaaaa

SEQ ID NO: 32353 - RNA, 20 nt, synthetic construct
  source 1..20: mol_type = other RNA
tagatgactctttcaatcct

SEQ ID NO: 32354 - RNA, 20 nt, synthetic construct
  source 1..20: mol_type = other RNA
tagcaataggacatccctga

SEQ ID NO: 32355 - RNA, 20 nt, synthetic construct
  source 1..20: mol_type = other RNA
tagctttacccttctgtcca

SEQ ID NO: 32356 - RNA, 20 nt, synthetic construct
  source 1..20: mol_type = other RNA
taggacatccctgagaactt

SEQ ID NO: 32357 - RNA, 20 nt, synthetic construct
  source 1..20: mol_type = other RNA
taggattgaaagagtcatct

SEQ ID NO: 32358 - RNA, 20 nt, synthetic construct
  source 1..20: mol_type = other RNA
tatactggtaaagaaggcaa

SEQ ID NO: 32359 - RNA, 20 nt, synthetic construct
  source 1..20: mol_type = other RNA
tatagatgactctttcaatc

SEQ ID NO: 32360 - RNA, 20 nt, synthetic construct
  source 1..20: mol_type = other RNA
tatcaagtcacacttaccca

SEQ ID NO: 32361 - RNA, 20 nt, synthetic construct
  source 1..20: mol_type = other RNA
tatgtgtgtgtgtttctgtg

SEQ ID NO: 32362 - RNA, 20 nt, synthetic construct
  source 1..20: mol_type = other RNA
tattaggattgaaagagtca

SEQ ID NO: 32363 - RNA, 20 nt, synthetic construct
  source 1..20: mol_type = other RNA
tattgctaagtgggtaagtg

SEQ ID NO: 32364 - RNA, 20 nt, synthetic construct
  source 1..20: mol_type = other RNA
tcaagtcacacttacccact

SEQ ID NO: 32365 - RNA, 20 nt, synthetic construct
  source 1..20: mol_type = other RNA
tcaatcctaatagctttacc

SEQ ID NO: 32366 - RNA, 20 nt, synthetic construct
  source 1..20: mol_type = other RNA
tcacacttacccacttagca

SEQ ID NO: 32367 - RNA, 20 nt, synthetic construct
  source 1..20: mol_type = other RNA
tcagggatgtcctattgcta

SEQ ID NO: 32368 - RNA, 20 nt, synthetic construct
  source 1..20: mol_type = other RNA
tcatctatactggtaaagaa

SEQ ID NO: 32369 - RNA, 20 nt, synthetic construct
  source 1..20: mol_type = other RNA
tccaaaccttaaagaaaccc

SEQ ID NO: 32370 - RNA, 20 nt, synthetic construct
  source 1..20: mol_type = other RNA
tccctgagaacttttgcctt

SEQ ID NO: 32371 - RNA, 20 nt, synthetic construct
  source 1..20: mol_type = other RNA
tcctaatagctttacccttc

SEQ ID NO: 32372 - RNA, 20 nt, synthetic construct
  source 1..20: mol_type = other RNA
tcctattgctaagtgggtaa

SEQ ID NO: 32373 - RNA, 20 nt, synthetic construct
  source 1..20: mol_type = other RNA
tctatactggtaaagaaggc

SEQ ID NO: 32374 - RNA, 20 nt, synthetic construct
  source 1..20: mol_type = other RNA
tctcagggatgtcctattgc

SEQ ID NO: 32375 - RNA, 20 nt, synthetic construct
  source 1..20: mol_type = other RNA
tctgtccaaaccttaaagaa

SEQ ID NO: 32376 - RNA, 20 nt, synthetic construct
  source 1..20: mol_type = other RNA
tctgtgggtttctttaaggt

SEQ ID NO: 32377 - RNA, 20 nt, synthetic construct
  source 1..20: mol_type = other RNA
tctttaaggtttggacagaa

SEQ ID NO: 32378 - RNA, 20 nt, synthetic construct
  source 1..20: mol_type = other RNA
tctttaccagtatagatgac

SEQ ID NO: 32379 - RNA, 20 nt, synthetic construct
  source 1..20: mol_type = other RNA
tctttcaatcctaatagctt

SEQ ID NO: 32380 - RNA, 20 nt, synthetic construct
  source 1..20: mol_type = other RNA
tgaaagagtcatctatactg

SEQ ID NO: 32381 - RNA, 20 nt, synthetic construct
  source 1..20: mol_type = other RNA
tgactctttcaatcctaata

SEQ ID NO: 32382 - RNA, 20 nt, synthetic construct
  source 1..20: mol_type = other RNA
tgacttgataaagcctttgg

SEQ ID NO: 32383 - RNA, 20 nt, synthetic construct
  source 1..20: mol_type = other RNA
tgagaacttttgccttcttt

SEQ ID NO: 32384 - RNA, 20 nt, synthetic construct
  source 1..20: mol_type = other RNA
tgccttctttaccagtatag

SEQ ID NO: 32385 - RNA, 20 nt, synthetic construct
  source 1..20: mol_type = other RNA
tgctaagtgggtaagtgtga

SEQ ID NO: 32386 - RNA, 20 nt, synthetic construct
  source 1..20: mol_type = other RNA
tggacagaagggtaaagcta

SEQ ID NO: 32387 - RNA, 20 nt, synthetic construct
  source 1..20: mol_type = other RNA
tgggtaagtgtgacttgata

SEQ ID NO: 32388 - RNA, 20 nt, synthetic construct
  source 1..20: mol_type = other RNA
tgggtttctttaaggtttgg

SEQ ID NO: 32389 - RNA, 20 nt, synthetic construct
  source 1..20: mol_type = other RNA
tggtaaagaaggcaaaagtt

SEQ ID NO: 32390 - RNA, 20 nt, synthetic construct
  source 1..20: mol_type = other RNA
tgtatgtgtgtgtgtttctg

SEQ ID NO: 32391 - RNA, 20 nt, synthetic construct
  source 1..20: mol_type = other RNA
tgtccaaaccttaaagaaac

SEQ ID NO: 32392 - RNA, 20 nt, synthetic construct
  source 1..20: mol_type = other RNA
tgtcctattgctaagtgggt

SEQ ID NO: 32393 - RNA, 20 nt, synthetic construct
  source 1..20: mol_type = other RNA
tgtgacttgataaagccttt

SEQ ID NO: 32394 - RNA, 20 nt, synthetic construct
  source 1..20: mol_type = other RNA
tgtgggtttctttaaggttt

SEQ ID NO: 32395 - RNA, 20 nt, synthetic construct
  source 1..20: mol_type = other RNA
tgtgtgtgtgtttctgtggg

SEQ ID NO: 32396 - RNA, 20 nt, synthetic construct
  source 1..20: mol_type = other RNA
tgtgtgtgtttctgtgggtt

SEQ ID NO: 32397 - RNA, 20 nt, synthetic construct
  source 1..20: mol_type = other RNA
tgtgtgtttctgtgggtttc

SEQ ID NO: 32398 - RNA, 20 nt, synthetic construct
  source 1..20: mol_type = other RNA
tgtgtttctgtgggtttctt

SEQ ID NO: 32399 - RNA, 20 nt, synthetic construct
  source 1..20: mol_type = other RNA
tgtttctgtgggtttcttta

SEQ ID NO: 32400 - RNA, 20 nt, synthetic construct
  source 1..20: mol_type = other RNA
ttaaagaaacccacagaaac

SEQ ID NO: 32401 - RNA, 20 nt, synthetic construct
  source 1..20: mol_type = other RNA
ttaagaccaaaggctttatc

SEQ ID NO: 32402 - RNA, 20 nt, synthetic construct
  source 1..20: mol_type = other RNA
ttaaggtttggacagaaggg

SEQ ID NO: 32403 - RNA, 20 nt, synthetic construct
  source 1..20: mol_type = other RNA
ttaccagtatagatgactct

SEQ ID NO: 32404 - RNA, 20 nt, synthetic construct
  source 1..20: mol_type = other RNA
ttacccacttagcaatagga

SEQ ID NO: 32405 - RNA, 20 nt, synthetic construct
  source 1..20: mol_type = other RNA
ttacccttctgtccaaacct

SEQ ID NO: 32406 - RNA, 20 nt, synthetic construct
  source 1..20: mol_type = other RNA
ttagcaataggacatccctg

SEQ ID NO: 32407 - RNA, 20 nt, synthetic construct
  source 1..20: mol_type = other RNA
ttaggattgaaagagtcatc

SEQ ID NO: 32408 - RNA, 20 nt, synthetic construct
  source 1..20: mol_type = other RNA
ttatcaagtcacacttaccc

SEQ ID NO: 32409 - RNA, 20 nt, synthetic construct
  source 1..20: mol_type = other RNA
ttcaatcctaatagctttac

SEQ ID NO: 32410 - RNA, 20 nt, synthetic construct
  source 1..20: mol_type = other RNA
ttctcagggatgtcctattg

SEQ ID NO: 32411 - RNA, 20 nt, synthetic construct
  source 1..20: mol_type = other RNA
ttctgtccaaaccttaaaga

SEQ ID NO: 32412 - RNA, 20 nt, synthetic construct
  source 1..20: mol_type = other RNA
ttctgtgggtttctttaagg

SEQ ID NO: 32413 - RNA, 20 nt, synthetic construct
  source 1..20: mol_type = other RNA
ttctttaaggtttggacaga

SEQ ID NO: 32414 - RNA, 20 nt, synthetic construct
  source 1..20: mol_type = other RNA
ttctttaccagtatagatga

SEQ ID NO: 32415 - RNA, 20 nt, synthetic construct
  source 1..20: mol_type = other RNA
ttgaaagagtcatctatact

SEQ ID NO: 32416 - RNA, 20 nt, synthetic construct
  source 1..20: mol_type = other RNA
ttgccttctttaccagtata

SEQ ID NO: 32417 - RNA, 20 nt, synthetic construct
  source 1..20: mol_type = other RNA
ttgctaagtgggtaagtgtg

SEQ ID NO: 32418 - RNA, 20 nt, synthetic construct
  source 1..20: mol_type = other RNA
ttggacagaagggtaaagct

SEQ ID NO: 32419 - RNA, 20 nt, synthetic construct
  source 1..20: mol_type = other RNA
ttgtatgtgtgtgtgtttct

SEQ ID NO: 32420 - RNA, 20 nt, synthetic construct
  source 1..20: mol_type = other RNA
tttaagaccaaaggctttat

SEQ ID NO: 32421 - RNA, 20 nt, synthetic construct
  source 1..20: mol_type = other RNA
tttaaggtttggacagaagg

SEQ ID NO: 32422 - RNA, 20 nt, synthetic construct
  source 1..20: mol_type = other RNA
tttaccagtatagatgactc

SEQ ID NO: 32423 - RNA, 20 nt, synthetic construct
  source 1..20: mol_type = other RNA
tttacccttctgtccaaacc

SEQ ID NO: 32424 - RNA, 20 nt, synthetic construct
  source 1..20: mol_type = other RNA
tttatcaagtcacacttacc

SEQ ID NO: 32425 - RNA, 20 nt, synthetic construct
  source 1..20: mol_type = other RNA
tttcaatcctaatagcttta

SEQ ID NO: 32426 - RNA, 20 nt, synthetic construct
  source 1..20: mol_type = other RNA
tttctgtgggtttctttaag

SEQ ID NO: 32427 - RNA, 20 nt, synthetic construct
  source 1..20: mol_type = other RNA
tttctttaaggtttggacag

SEQ ID NO: 32428 - RNA, 20 nt, synthetic construct
  source 1..20: mol_type = other RNA
tttgccttctttaccagtat

SEQ ID NO: 32429 - RNA, 20 nt, synthetic construct
  source 1..20: mol_type = other RNA
tttggacagaagggtaaagc

SEQ ID NO: 32430 - RNA, 20 nt, synthetic construct
  source 1..20: mol_type = other RNA
ttttgccttctttaccagta

SEQ ID NO: 32431 - RNA, 21 nt, synthetic construct
  source 1..21: mol_type = other RNA
aaaagttctcagggatgtcct

SEQ ID NO: 32432 - RNA, 21 nt, synthetic construct
  source 1..21: mol_type = other RNA
aaacccacagaaacacacaca

SEQ ID NO: 32433 - RNA, 21 nt, synthetic construct
  source 1..21: mol_type = other RNA
aaaccttaaagaaacccacag

SEQ ID NO: 32434 - RNA, 21 nt, synthetic construct
  source 1..21: mol_type = other RNA
aaagaaacccacagaaacaca

SEQ ID NO: 32435 - RNA, 21 nt, synthetic construct
  source 1..21: mol_type = other RNA
aaagaaggcaaaagttctcag

SEQ ID NO: 32436 - RNA, 21 nt, synthetic construct
  source 1..21: mol_type = other RNA
aaagagtcatctatactggta

SEQ ID NO: 32437 - RNA, 21 nt, synthetic construct
  source 1..21: mol_type = other RNA
aaagctattaggattgaaaga

SEQ ID NO: 32438 - RNA, 21 nt, synthetic construct
  source 1..21: mol_type = other RNA
aaaggctttatcaagtcacac

SEQ ID NO: 32439 - RNA, 21 nt, synthetic construct
  source 1..21: mol_type = other RNA
aaagttctcagggatgtccta

SEQ ID NO: 32440 - RNA, 21 nt, synthetic construct
  source 1..21: mol_type = other RNA
aacccacagaaacacacacac

SEQ ID NO: 32441 - RNA, 21 nt, synthetic construct
  source 1..21: mol_type = other RNA
aaccttaaagaaacccacaga

SEQ ID NO: 32442 - RNA, 21 nt, synthetic construct
  source 1..21: mol_type = other RNA
aacttttgccttctttaccag

SEQ ID NO: 32443 - RNA, 21 nt, synthetic construct
  source 1..21: mol_type = other RNA
aagaaacccacagaaacacac

SEQ ID NO: 32444 - RNA, 21 nt, synthetic construct
  source 1..21: mol_type = other RNA
aagaaggcaaaagttctcagg

SEQ ID NO: 32445 - RNA, 21 nt, synthetic construct
  source 1..21: mol_type = other RNA
aagaccaaaggctttatcaag

SEQ ID NO: 32446 - RNA, 21 nt, synthetic construct
  source 1..21: mol_type = other RNA
aagagtcatctatactggtaa

SEQ ID NO: 32447 - RNA, 21 nt, synthetic construct
  source 1..21: mol_type = other RNA
aagatttaagaccaaaggctt

SEQ ID NO: 32448 - RNA, 21 nt, synthetic construct
  source 1..21: mol_type = other RNA
aagctattaggattgaaagag

SEQ ID NO: 32449 - RNA, 21 nt, synthetic construct
  source 1..21: mol_type = other RNA
aaggcaaaagttctcagggat

SEQ ID NO: 32450 - RNA, 21 nt, synthetic construct
  source 1..21: mol_type = other RNA
aaggctttatcaagtcacact

SEQ ID NO: 32451 - RNA, 21 nt, synthetic construct
  source 1..21: mol_type = other RNA
aagggtaaagctattaggatt

SEQ ID NO: 32452 - RNA, 21 nt, synthetic construct
  source 1..21: mol_type = other RNA
aaggtttggacagaagggtaa

SEQ ID NO: 32453 - RNA, 21 nt, synthetic construct
  source 1..21: mol_type = other RNA
aagtcacacttacccacttag

SEQ ID NO: 32454 - RNA, 21 nt, synthetic construct
  source 1..21: mol_type = other RNA
aagtgggtaagtgtgacttga

SEQ ID NO: 32455 - RNA, 21 nt, synthetic construct
  source 1..21: mol_type = other RNA
aagtgtgacttgataaagcct

SEQ ID NO: 32456 - RNA, 21 nt, synthetic construct
  source 1..21: mol_type = other RNA
aagttctcagggatgtcctat

SEQ ID NO: 32457 - RNA, 21 nt, synthetic construct
  source 1..21: mol_type = other RNA
aatagctttacccttctgtcc

SEQ ID NO: 32458 - RNA, 21 nt, synthetic construct
  source 1..21: mol_type = other RNA
aataggacatccctgagaact

SEQ ID NO: 32459 - RNA, 21 nt, synthetic construct
  source 1..21: mol_type = other RNA
aatcctaatagctttaccctt

SEQ ID NO: 32460 - RNA, 21 nt, synthetic construct
  source 1..21: mol_type = other RNA
aattgtatgtgtgtgtgtttc

SEQ ID NO: 32461 - RNA, 21 nt, synthetic construct
  source 1..21: mol_type = other RNA
acacttacccacttagcaata

SEQ ID NO: 32462 - RNA, 21 nt, synthetic construct
  source 1..21: mol_type = other RNA
acagaagggtaaagctattag

SEQ ID NO: 32463 - RNA, 21 nt, synthetic construct
  source 1..21: mol_type = other RNA
acatccctgagaacttttgcc

SEQ ID NO: 32464 - RNA, 21 nt, synthetic construct
  source 1..21: mol_type = other RNA
accaaaggctttatcaagtca

SEQ ID NO: 32465 - RNA, 21 nt, synthetic construct
  source 1..21: mol_type = other RNA
accagtatagatgactctttc

SEQ ID NO: 32466 - RNA, 21 nt, synthetic construct
  source 1..21: mol_type = other RNA
acccacagaaacacacacaca

SEQ ID NO: 32467 - RNA, 21 nt, synthetic construct
  source 1..21: mol_type = other RNA
acccacttagcaataggacat

SEQ ID NO: 32468 - RNA, 21 nt, synthetic construct
  source 1..21: mol_type = other RNA
acccttctgtccaaaccttaa

SEQ ID NO: 32469 - RNA, 21 nt, synthetic construct
  source 1..21: mol_type = other RNA
accttaaagaaacccacagaa

SEQ ID NO: 32470 - RNA, 21 nt, synthetic construct
  source 1..21: mol_type = other RNA
actctttcaatcctaatagct

SEQ ID NO: 32471 - RNA, 21 nt, synthetic construct
  source 1..21: mol_type = other RNA
actggtaaagaaggcaaaagt

SEQ ID NO: 32472 - RNA, 21 nt, synthetic construct
  source 1..21: mol_type = other RNA
acttacccacttagcaatagg

SEQ ID NO: 32473 - RNA, 21 nt, synthetic construct
  source 1..21: mol_type = other RNA
acttagcaataggacatccct

SEQ ID NO: 32474 - RNA, 21 nt, synthetic construct
  source 1..21: mol_type = other RNA
acttgataaagcctttggtct

SEQ ID NO: 32475 - RNA, 21 nt, synthetic construct
  source 1..21: mol_type = other RNA
acttttgccttctttaccagt

SEQ ID NO: 32476 - RNA, 21 nt, synthetic construct
  source 1..21: mol_type = other RNA
agaaacccacagaaacacaca

SEQ ID NO: 32477 - RNA, 21 nt, synthetic construct
  source 1..21: mol_type = other RNA
agaacttttgccttctttacc

SEQ ID NO: 32478 - RNA, 21 nt, synthetic construct
  source 1..21: mol_type = other RNA
agaaggcaaaagttctcaggg

SEQ ID NO: 32479 - RNA, 21 nt, synthetic construct
  source 1..21: mol_type = other RNA
agaagggtaaagctattagga

SEQ ID NO: 32480 - RNA, 21 nt, synthetic construct
  source 1..21: mol_type = other RNA
agaccaaaggctttatcaagt

SEQ ID NO: 32481 - RNA, 21 nt, synthetic construct
  source 1..21: mol_type = other RNA
agagtcatctatactggtaaa

SEQ ID NO: 32482 - RNA, 21 nt, synthetic construct
  source 1..21: mol_type = other RNA
agatgactctttcaatcctaa

SEQ ID NO: 32483 - RNA, 21 nt, synthetic construct
  source 1..21: mol_type = other RNA
agatttaagaccaaaggcttt

SEQ ID NO: 32484 - RNA, 21 nt, synthetic construct
  source 1..21: mol_type = other RNA
agcaataggacatccctgaga

SEQ ID NO: 32485 - RNA, 21 nt, synthetic construct
  source 1..21: mol_type = other RNA
agctattaggattgaaagagt

SEQ ID NO: 32486 - RNA, 21 nt, synthetic construct
  source 1..21: mol_type = other RNA
agctttacccttctgtccaaa

SEQ ID NO: 32487 - RNA, 21 nt, synthetic construct
  source 1..21: mol_type = other RNA
aggacatccctgagaactttt

SEQ ID NO: 32488 - RNA, 21 nt, synthetic construct
  source 1..21: mol_type = other RNA
aggattgaaagagtcatctat

SEQ ID NO: 32489 - RNA, 21 nt, synthetic construct
  source 1..21: mol_type = other RNA
aggcaaaagttctcagggatg

SEQ ID NO: 32490 - RNA, 21 nt, synthetic construct
  source 1..21: mol_type = other RNA
aggctttatcaagtcacactt

SEQ ID NO: 32491 - RNA, 21 nt, synthetic construct
  source 1..21: mol_type = other RNA
agggatgtcctattgctaagt

SEQ ID NO: 32492 - RNA, 21 nt, synthetic construct
  source 1..21: mol_type = other RNA
agggtaaagctattaggattg

SEQ ID NO: 32493 - RNA, 21 nt, synthetic construct
  source 1..21: mol_type = other RNA
aggtttggacagaagggtaaa

SEQ ID NO: 32494 - RNA, 21 nt, synthetic construct
  source 1..21: mol_type = other RNA
agtatagatgactctttcaat

SEQ ID NO: 32495 - RNA, 21 nt, synthetic construct
  source 1..21: mol_type = other RNA
agtcacacttacccacttagc

SEQ ID NO: 32496 - RNA, 21 nt, synthetic construct
  source 1..21: mol_type = other RNA
agtcatctatactggtaaaga

SEQ ID NO: 32497 - RNA, 21 nt, synthetic construct
  source 1..21: mol_type = other RNA
agtgggtaagtgtgacttgat

SEQ ID NO: 32498 - RNA, 21 nt, synthetic construct
  source 1..21: mol_type = other RNA
agtgtgacttgataaagcctt

SEQ ID NO: 32499 - RNA, 21 nt, synthetic construct
  source 1..21: mol_type = other RNA
agttctcagggatgtcctatt

SEQ ID NO: 32500 - RNA, 21 nt, synthetic construct
  source 1..21: mol_type = other RNA
atactggtaaagaaggcaaaa

SEQ ID NO: 32501 - RNA, 21 nt, synthetic construct
  source 1..21: mol_type = other RNA
atagatgactctttcaatcct

SEQ ID NO: 32502 - RNA, 21 nt, synthetic construct
  source 1..21: mol_type = other RNA
atagctttacccttctgtcca

SEQ ID NO: 32503 - RNA, 21 nt, synthetic construct
  source 1..21: mol_type = other RNA
ataggacatccctgagaactt

SEQ ID NO: 32504 - RNA, 21 nt, synthetic construct
  source 1..21: mol_type = other RNA
atcaagtcacacttacccact

SEQ ID NO: 32505 - RNA, 21 nt, synthetic construct
  source 1..21: mol_type = other RNA
atccctgagaacttttgcctt

SEQ ID NO: 32506 - RNA, 21 nt, synthetic construct
  source 1..21: mol_type = other RNA
atcctaatagctttacccttc

SEQ ID NO: 32507 - RNA, 21 nt, synthetic construct
  source 1..21: mol_type = other RNA
atctatactggtaaagaaggc

SEQ ID NO: 32508 - RNA, 21 nt, synthetic construct
  source 1..21: mol_type = other RNA
atgactctttcaatcctaata

SEQ ID NO: 32509 - RNA, 21 nt, synthetic construct
  source 1..21: mol_type = other RNA
atgtcctattgctaagtgggt

SEQ ID NO: 32510 - RNA, 21 nt, synthetic construct
  source 1..21: mol_type = other RNA
atgtgtgtgtgtttctgtggg

SEQ ID NO: 32511 - RNA, 21 nt, synthetic construct
  source 1..21: mol_type = other RNA
attaggattgaaagagtcatc

SEQ ID NO: 32512 - RNA, 21 nt, synthetic construct
  source 1..21: mol_type = other RNA
attgaaagagtcatctatact

SEQ ID NO: 32513 - RNA, 21 nt, synthetic construct
  source 1..21: mol_type = other RNA
attgctaagtgggtaagtgtg

SEQ ID NO: 32514 - RNA, 21 nt, synthetic construct
  source 1..21: mol_type = other RNA
attgtatgtgtgtgtgtttct

SEQ ID NO: 32515 - RNA, 21 nt, synthetic construct
  source 1..21: mol_type = other RNA
atttaagaccaaaggctttat

SEQ ID NO: 32516 - RNA, 21 nt, synthetic construct
  source 1..21: mol_type = other RNA
caaaagttctcagggatgtcc

SEQ ID NO: 32517 - RNA, 21 nt, synthetic construct
  source 1..21: mol_type = other RNA
caaaccttaaagaaacccaca

SEQ ID NO: 32518 - RNA, 21 nt, synthetic construct
  source 1..21: mol_type = other RNA
caaaggctttatcaagtcaca

SEQ ID NO: 32519 - RNA, 21 nt, synthetic construct
  source 1..21: mol_type = other RNA
caagtcacacttacccactta

SEQ ID NO: 32520 - RNA, 21 nt, synthetic construct
  source 1..21: mol_type = other RNA
caataggacatccctgagaac

SEQ ID NO: 32521 - RNA, 21 nt, synthetic construct
  source 1..21: mol_type = other RNA
caatcctaatagctttaccct

SEQ ID NO: 32522 - RNA, 21 nt, synthetic construct
  source 1..21: mol_type = other RNA
cacacttacccacttagcaat

SEQ ID NO: 32523 - RNA, 21 nt, synthetic construct
  source 1..21: mol_type = other RNA
cacttacccacttagcaatag

SEQ ID NO: 32524 - RNA, 21 nt, synthetic construct
  source 1..21: mol_type = other RNA
cacttagcaataggacatccc

SEQ ID NO: 32525 - RNA, 21 nt, synthetic construct
  source 1..21: mol_type = other RNA
cagaagggtaaagctattagg

SEQ ID NO: 32526 - RNA, 21 nt, synthetic construct
  source 1..21: mol_type = other RNA
cagggatgtcctattgctaag

SEQ ID NO: 32527 - RNA, 21 nt, synthetic construct
  source 1..21: mol_type = other RNA
cagtatagatgactctttcaa

SEQ ID NO: 32528 - RNA, 21 nt, synthetic construct
  source 1..21: mol_type = other RNA
catccctgagaacttttgcct

SEQ ID NO: 32529 - RNA, 21 nt, synthetic construct
  source 1..21: mol_type = other RNA
catctatactggtaaagaagg

SEQ ID NO: 32530 - RNA, 21 nt, synthetic construct
  source 1..21: mol_type = other RNA
ccaaaccttaaagaaacccac

SEQ ID NO: 32531 - RNA, 21 nt, synthetic construct
  source 1..21: mol_type = other RNA
ccaaaggctttatcaagtcac

SEQ ID NO: 32532 - RNA, 21 nt, synthetic construct
  source 1..21: mol_type = other RNA
ccacttagcaataggacatcc

SEQ ID NO: 32533 - RNA, 21 nt, synthetic construct
  source 1..21: mol_type = other RNA
ccagtatagatgactctttca

SEQ ID NO: 32534 - RNA, 21 nt, synthetic construct
  source 1..21: mol_type = other RNA
cccacagaaacacacacacat

SEQ ID NO: 32535 - RNA, 21 nt, synthetic construct
  source 1..21: mol_type = other RNA
cccacttagcaataggacatc

SEQ ID NO: 32536 - RNA, 21 nt, synthetic construct
  source 1..21: mol_type = other RNA
ccctgagaacttttgccttct

SEQ ID NO: 32537 - RNA, 21 nt, synthetic construct
  source 1..21: mol_type = other RNA
cccttctgtccaaaccttaaa

SEQ ID NO: 32538 - RNA, 21 nt, synthetic construct
  source 1..21: mol_type = other RNA
cctaatagctttacccttctg

SEQ ID NO: 32539 - RNA, 21 nt, synthetic construct
  source 1..21: mol_type = other RNA
cctattgctaagtgggtaagt

SEQ ID NO: 32540 - RNA, 21 nt, synthetic construct
  source 1..21: mol_type = other RNA
cctgagaacttttgccttctt

SEQ ID NO: 32541 - RNA, 21 nt, synthetic construct
  source 1..21: mol_type = other RNA
ccttaaagaaacccacagaaa

SEQ ID NO: 32542 - RNA, 21 nt, synthetic construct
  source 1..21: mol_type = other RNA
ccttctgtccaaaccttaaag

SEQ ID NO: 32543 - RNA, 21 nt, synthetic construct
  source 1..21: mol_type = other RNA
ccttctttaccagtatagatg

SEQ ID NO: 32544 - RNA, 21 nt, synthetic construct
  source 1..21: mol_type = other RNA
ctaagtgggtaagtgtgactt

SEQ ID NO: 32545 - RNA, 21 nt, synthetic construct
  source 1..21: mol_type = other RNA
ctaatagctttacccttctgt

SEQ ID NO: 32546 - RNA, 21 nt, synthetic construct
  source 1..21: mol_type = other RNA
ctaattgtatgtgtgtgtgtt

SEQ ID NO: 32547 - RNA, 21 nt, synthetic construct
  source 1..21: mol_type = other RNA
ctatactggtaaagaaggcaa

SEQ ID NO: 32548 - RNA, 21 nt, synthetic construct
  source 1..21: mol_type = other RNA
ctattaggattgaaagagtca

SEQ ID NO: 32549 - RNA, 21 nt, synthetic construct
  source 1..21: mol_type = other RNA
ctattgctaagtgggtaagtg

SEQ ID NO: 32550 - RNA, 21 nt, synthetic construct
  source 1..21: mol_type = other RNA
ctcagggatgtcctattgcta

SEQ ID NO: 32551 - RNA, 21 nt, synthetic construct
  source 1..21: mol_type = other RNA
ctctttcaatcctaatagctt

SEQ ID NO: 32552 - RNA, 21 nt, synthetic construct
  source 1..21: mol_type = other RNA
ctgagaacttttgccttcttt

SEQ ID NO: 32553 - RNA, 21 nt, synthetic construct
  source 1..21: mol_type = other RNA
ctggtaaagaaggcaaaagtt

SEQ ID NO: 32554 - RNA, 21 nt, synthetic construct
  source 1..21: mol_type = other RNA
ctgtccaaaccttaaagaaac

SEQ ID NO: 32555 - RNA, 21 nt, synthetic construct
  source 1..21: mol_type = other RNA
ctgtgggtttctttaaggttt

SEQ ID NO: 32556 - RNA, 21 nt, synthetic construct
  source 1..21: mol_type = other RNA
cttaaagaaacccacagaaac

SEQ ID NO: 32557 - RNA, 21 nt, synthetic construct
  source 1..21: mol_type = other RNA
cttacccacttagcaatagga

SEQ ID NO: 32558 - RNA, 21 nt, synthetic construct
  source 1..21: mol_type = other RNA
cttagcaataggacatccctg

SEQ ID NO: 32559 - RNA, 21 nt, synthetic construct
  source 1..21: mol_type = other RNA
cttctgtccaaaccttaaaga

SEQ ID NO: 32560 - RNA, 21 nt, synthetic construct
  source 1..21: mol_type = other RNA
cttctttaccagtatagatga

SEQ ID NO: 32561 - RNA, 21 nt, synthetic construct
  source 1..21: mol_type = other RNA
ctttaaggtttggacagaagg

SEQ ID NO: 32562 - RNA, 21 nt, synthetic construct
  source 1..21: mol_type = other RNA
ctttaccagtatagatgactc

SEQ ID NO: 32563 - RNA, 21 nt, synthetic construct
  source 1..21: mol_type = other RNA
ctttacccttctgtccaaacc

SEQ ID NO: 32564 - RNA, 21 nt, synthetic construct
  source 1..21: mol_type = other RNA
ctttatcaagtcacacttacc

SEQ ID NO: 32565 - RNA, 21 nt, synthetic construct
  source 1..21: mol_type = other RNA
ctttcaatcctaatagcttta

SEQ ID NO: 32566 - RNA, 21 nt, synthetic construct
  source 1..21: mol_type = other RNA
cttttgccttctttaccagta

SEQ ID NO: 32567 - RNA, 21 nt, synthetic construct
  source 1..21: mol_type = other RNA
gaaacccacagaaacacacac

SEQ ID NO: 32568 - RNA, 21 nt, synthetic construct
  source 1..21: mol_type = other RNA
gaaagagtcatctatactggt

SEQ ID NO: 32569 - RNA, 21 nt, synthetic construct
  source 1..21: mol_type = other RNA
gaacttttgccttctttacca

SEQ ID NO: 32570 - RNA, 21 nt, synthetic construct
  source 1..21: mol_type = other RNA
gaaggcaaaagttctcaggga

SEQ ID NO: 32571 - RNA, 21 nt, synthetic construct
  source 1..21: mol_type = other RNA
gaagggtaaagctattaggat

SEQ ID NO: 32572 - RNA, 21 nt, synthetic construct
  source 1..21: mol_type = other RNA
gacagaagggtaaagctatta

SEQ ID NO: 32573 - RNA, 21 nt, synthetic construct
  source 1..21: mol_type = other RNA
gacatccctgagaacttttgc

SEQ ID NO: 32574 - RNA, 21 nt, synthetic construct
  source 1..21: mol_type = other RNA
gaccaaaggctttatcaagtc

SEQ ID NO: 32575 - RNA, 21 nt, synthetic construct
  source 1..21: mol_type = other RNA
gactctttcaatcctaatagc

SEQ ID NO: 32576 - RNA, 21 nt, synthetic construct
  source 1..21: mol_type = other RNA
gacttgataaagcctttggtc

SEQ ID NO: 32577 - RNA, 21 nt, synthetic construct
  source 1..21: mol_type = other RNA
gagaacttttgccttctttac

SEQ ID NO: 32578 - RNA, 21 nt, synthetic construct
  source 1..21: mol_type = other RNA
gagtcatctatactggtaaag

SEQ ID NO: 32579 - RNA, 21 nt, synthetic construct
  source 1..21: mol_type = other RNA
gatgactctttcaatcctaat

SEQ ID NO: 32580 - RNA, 21 nt, synthetic construct
  source 1..21: mol_type = other RNA
gatgtcctattgctaagtggg

SEQ ID NO: 32581 - RNA, 21 nt, synthetic construct
  source 1..21: mol_type = other RNA
gattgaaagagtcatctatac

SEQ ID NO: 32582 - RNA, 21 nt, synthetic construct
  source 1..21: mol_type = other RNA
gatttaagaccaaaggcttta

SEQ ID NO: 32583 - RNA, 21 nt, synthetic construct
  source 1..21: mol_type = other RNA
gcaaaagttctcagggatgtc

SEQ ID NO: 32584 - RNA, 21 nt, synthetic construct
  source 1..21: mol_type = other RNA
gcaataggacatccctgagaa

SEQ ID NO: 32585 - RNA, 21 nt, synthetic construct
  source 1..21: mol_type = other RNA
gccttctttaccagtatagat

SEQ ID NO: 32586 - RNA, 21 nt, synthetic construct
  source 1..21: mol_type = other RNA
gctaagtgggtaagtgtgact

SEQ ID NO: 32587 - RNA, 21 nt, synthetic construct
  source 1..21: mol_type = other RNA
gctattaggattgaaagagtc

SEQ ID NO: 32588 - RNA, 21 nt, synthetic construct
  source 1..21: mol_type = other RNA
gctttacccttctgtccaaac

SEQ ID NO: 32589 - RNA, 21 nt, synthetic construct
  source 1..21: mol_type = other RNA
gctttatcaagtcacacttac

SEQ ID NO: 32590 - RNA, 21 nt, synthetic construct
  source 1..21: mol_type = other RNA
ggacagaagggtaaagctatt

SEQ ID NO: 32591 - RNA, 21 nt, synthetic construct
  source 1..21: mol_type = other RNA
ggacatccctgagaacttttg

SEQ ID NO: 32592 - RNA, 21 nt, synthetic construct
  source 1..21: mol_type = other RNA
ggatgtcctattgctaagtgg

SEQ ID NO: 32593 - RNA, 21 nt, synthetic construct
  source 1..21: mol_type = other RNA
ggattgaaagagtcatctata

SEQ ID NO: 32594 - RNA, 21 nt, synthetic construct
  source 1..21: mol_type = other RNA
ggcaaaagttctcagggatgt

SEQ ID NO: 32595 - RNA, 21 nt, synthetic construct
  source 1..21: mol_type = other RNA
ggctttatcaagtcacactta

SEQ ID NO: 32596 - RNA, 21 nt, synthetic construct
  source 1..21: mol_type = other RNA
gggatgtcctattgctaagtg

SEQ ID NO: 32597 - RNA, 21 nt, synthetic construct
  source 1..21: mol_type = other RNA
gggtaaagctattaggattga

SEQ ID NO: 32598 - RNA, 21 nt, synthetic construct
  source 1..21: mol_type = other RNA
gggtaagtgtgacttgataaa

SEQ ID NO: 32599 - RNA, 21 nt, synthetic construct
  source 1..21: mol_type = other RNA
gggtttctttaaggtttggac

SEQ ID NO: 32600 - RNA, 21 nt, synthetic construct
  source 1..21: mol_type = other RNA
ggtaaagaaggcaaaagttct

SEQ ID NO: 32601 - RNA, 21 nt, synthetic construct
  source 1..21: mol_type = other RNA
ggtaaagctattaggattgaa

SEQ ID NO: 32602 - RNA, 21 nt, synthetic construct
  source 1..21: mol_type = other RNA
ggtaagtgtgacttgataaag

SEQ ID NO: 32603 - RNA, 21 nt, synthetic construct
  source 1..21: mol_type = other RNA
ggtttctttaaggtttggaca

SEQ ID NO: 32604 - RNA, 21 nt, synthetic construct
  source 1..21: mol_type = other RNA
ggtttggacagaagggtaaag

SEQ ID NO: 32605 - RNA, 21 nt, synthetic construct
  source 1..21: mol_type = other RNA
gtaaagaaggcaaaagttctc

SEQ ID NO: 32606 - RNA, 21 nt, synthetic construct
  source 1..21: mol_type = other RNA
gtaaagctattaggattgaaa

SEQ ID NO: 32607 - RNA, 21 nt, synthetic construct
  source 1..21: mol_type = other RNA
gtaagtgtgacttgataaagc

SEQ ID NO: 32608 - RNA, 21 nt, synthetic construct
  source 1..21: mol_type = other RNA
gtatagatgactctttcaatc

SEQ ID NO: 32609 - RNA, 21 nt, synthetic construct
  source 1..21: mol_type = other RNA
gtatgtgtgtgtgtttctgtg

SEQ ID NO: 32610 - RNA, 21 nt, synthetic construct
  source 1..21: mol_type = other RNA
gtcacacttacccacttagca

SEQ ID NO: 32611 - RNA, 21 nt, synthetic construct
  source 1..21: mol_type = other RNA
gtcatctatactggtaaagaa

SEQ ID NO: 32612 - RNA, 21 nt, synthetic construct
  source 1..21: mol_type = other RNA
gtccaaaccttaaagaaaccc

SEQ ID NO: 32613 - RNA, 21 nt, synthetic construct
  source 1..21: mol_type = other RNA
gtcctattgctaagtgggtaa

SEQ ID NO: 32614 - RNA, 21 nt, synthetic construct
  source 1..21: mol_type = other RNA
gtgacttgataaagcctttgg

SEQ ID NO: 32615 - RNA, 21 nt, synthetic construct
  source 1..21: mol_type = other RNA
gtgggtaagtgtgacttgata

SEQ ID NO: 32616 - RNA, 21 nt, synthetic construct
  source 1..21: mol_type = other RNA
gtgggtttctttaaggtttgg

SEQ ID NO: 32617 - RNA, 21 nt, synthetic construct
  source 1..21: mol_type = other RNA
gtgtgacttgataaagccttt

SEQ ID NO: 32618 - RNA, 21 nt, synthetic construct
  source 1..21: mol_type = other RNA
gtgtgtgtgtttctgtgggtt

SEQ ID NO: 32619 - RNA, 21 nt, synthetic construct
  source 1..21: mol_type = other RNA
gtgtgtgtttctgtgggtttc

SEQ ID NO: 32620 - RNA, 21 nt, synthetic construct
  source 1..21: mol_type = other RNA
gtgtgtttctgtgggtttctt

SEQ ID NO: 32621 - RNA, 21 nt, synthetic construct
  source 1..21: mol_type = other RNA
gtgtttctgtgggtttcttta

SEQ ID NO: 32622 - RNA, 21 nt, synthetic construct
  source 1..21: mol_type = other RNA
gttctcagggatgtcctattg

SEQ ID NO: 32623 - RNA, 21 nt, synthetic construct
  source 1..21: mol_type = other RNA
gtttctgtgggtttctttaag

SEQ ID NO: 32624 - RNA, 21 nt, synthetic construct
  source 1..21: mol_type = other RNA
gtttctttaaggtttggacag

SEQ ID NO: 32625 - RNA, 21 nt, synthetic construct
  source 1..21: mol_type = other RNA
gtttggacagaagggtaaagc

SEQ ID NO: 32626 - RNA, 21 nt, synthetic construct
  source 1..21: mol_type = other RNA
taaagaaacccacagaaacac

SEQ ID NO: 32627 - RNA, 21 nt, synthetic construct
  source 1..21: mol_type = other RNA
taaagaaggcaaaagttctca

SEQ ID NO: 32628 - RNA, 21 nt, synthetic construct
  source 1..21: mol_type = other RNA
taaagctattaggattgaaag

SEQ ID NO: 32629 - RNA, 21 nt, synthetic construct
  source 1..21: mol_type = other RNA
taagaccaaaggctttatcaa

SEQ ID NO: 32630 - RNA, 21 nt, synthetic construct
  source 1..21: mol_type = other RNA
taaggtttggacagaagggta

SEQ ID NO: 32631 - RNA, 21 nt, synthetic construct
  source 1..21: mol_type = other RNA
taagtgggtaagtgtgacttg

SEQ ID NO: 32632 - RNA, 21 nt, synthetic construct
  source 1..21: mol_type = other RNA
taagtgtgacttgataaagcc

SEQ ID NO: 32633 - RNA, 21 nt, synthetic construct
  source 1..21: mol_type = other RNA
taatagctttacccttctgtc

SEQ ID NO: 32634 - RNA, 21 nt, synthetic construct
  source 1..21: mol_type = other RNA
taattgtatgtgtgtgtgttt

SEQ ID NO: 32635 - RNA, 21 nt, synthetic construct
  source 1..21: mol_type = other RNA
taccagtatagatgactcttt

SEQ ID NO: 32636 - RNA, 21 nt, synthetic construct
  source 1..21: mol_type = other RNA
tacccacttagcaataggaca

SEQ ID NO: 32637 - RNA, 21 nt, synthetic construct
  source 1..21: mol_type = other RNA
tacccttctgtccaaacctta

SEQ ID NO: 32638 - RNA, 21 nt, synthetic construct
  source 1..21: mol_type = other RNA
tactggtaaagaaggcaaaag

SEQ ID NO: 32639 - RNA, 21 nt, synthetic construct
  source 1..21: mol_type = other RNA
tagatgactctttcaatccta

SEQ ID NO: 32640 - RNA, 21 nt, synthetic construct
  source 1..21: mol_type = other RNA
tagcaataggacatccctgag

SEQ ID NO: 32641 - RNA, 21 nt, synthetic construct
  source 1..21: mol_type = other RNA
tagctttacccttctgtccaa

SEQ ID NO: 32642 - RNA, 21 nt, synthetic construct
  source 1..21: mol_type = other RNA
taggacatccctgagaacttt

SEQ ID NO: 32643 - RNA, 21 nt, synthetic construct
  source 1..21: mol_type = other RNA
taggattgaaagagtcatcta

SEQ ID NO: 32644 - RNA, 21 nt, synthetic construct
  source 1..21: mol_type = other RNA
tatactggtaaagaaggcaaa

SEQ ID NO: 32645 - RNA, 21 nt, synthetic construct
  source 1..21: mol_type = other RNA
tatagatgactctttcaatcc

SEQ ID NO: 32646 - RNA, 21 nt, synthetic construct
  source 1..21: mol_type = other RNA
tatcaagtcacacttacccac

SEQ ID NO: 32647 - RNA, 21 nt, synthetic construct
  source 1..21: mol_type = other RNA
tatgtgtgtgtgtttctgtgg

SEQ ID NO: 32648 - RNA, 21 nt, synthetic construct
  source 1..21: mol_type = other RNA
tattaggattgaaagagtcat

SEQ ID NO: 32649 - RNA, 21 nt, synthetic construct
  source 1..21: mol_type = other RNA
tattgctaagtgggtaagtgt

SEQ ID NO: 32650 - RNA, 21 nt, synthetic construct
  source 1..21: mol_type = other RNA
tcaagtcacacttacccactt

SEQ ID NO: 32651 - RNA, 21 nt, synthetic construct
  source 1..21: mol_type = other RNA
tcaatcctaatagctttaccc

SEQ ID NO: 32652 - RNA, 21 nt, synthetic construct
  source 1..21: mol_type = other RNA
tcacacttacccacttagcaa

SEQ ID NO: 32653 - RNA, 21 nt, synthetic construct
  source 1..21: mol_type = other RNA
tcagggatgtcctattgctaa

SEQ ID NO: 32654 - RNA, 21 nt, synthetic construct
  source 1..21: mol_type = other RNA
tcatctatactggtaaagaag

SEQ ID NO: 32655 - RNA, 21 nt, synthetic construct
  source 1..21: mol_type = other RNA
tccaaaccttaaagaaaccca

SEQ ID NO: 32656 - RNA, 21 nt, synthetic construct
  source 1..21: mol_type = other RNA
tccctgagaacttttgccttc

SEQ ID NO: 32657 - RNA, 21 nt, synthetic construct
  source 1..21: mol_type = other RNA
tcctaatagctttacccttct

SEQ ID NO: 32658 - RNA, 21 nt, synthetic construct
  source 1..21: mol_type = other RNA
tcctattgctaagtgggtaag

SEQ ID NO: 32659 - RNA, 21 nt, synthetic construct
  source 1..21: mol_type = other RNA
tctatactggtaaagaaggca

SEQ ID NO: 32660 - RNA, 21 nt, synthetic construct
  source 1..21: mol_type = other RNA
tctcagggatgtcctattgct

SEQ ID NO: 32661 - RNA, 21 nt, synthetic construct
  source 1..21: mol_type = other RNA
tctgtccaaaccttaaagaaa

SEQ ID NO: 32662 - RNA, 21 nt, synthetic construct
  source 1..21: mol_type = other RNA
tctgtgggtttctttaaggtt

SEQ ID NO: 32663 - RNA, 21 nt, synthetic construct
  source 1..21: mol_type = other RNA
tctttaaggtttggacagaag

SEQ ID NO: 32664 - RNA, 21 nt, synthetic construct
  source 1..21: mol_type = other RNA
tctttaccagtatagatgact

SEQ ID NO: 32665 - RNA, 21 nt, synthetic construct
  source 1..21: mol_type = other RNA
tctttcaatcctaatagcttt

SEQ ID NO: 32666 - RNA, 21 nt, synthetic construct
  source 1..21: mol_type = other RNA
tgaaagagtcatctatactgg

SEQ ID NO: 32667 - RNA, 21 nt, synthetic construct
  source 1..21: mol_type = other RNA
tgactctttcaatcctaatag

SEQ ID NO: 32668 - RNA, 21 nt, synthetic construct
  source 1..21: mol_type = other RNA
tgacttgataaagcctttggt

SEQ ID NO: 32669 - RNA, 21 nt, synthetic construct
  source 1..21: mol_type = other RNA
tgagaacttttgccttcttta

SEQ ID NO: 32670 - RNA, 21 nt, synthetic construct
  source 1..21: mol_type = other RNA
tgccttctttaccagtataga

SEQ ID NO: 32671 - RNA, 21 nt, synthetic construct
  source 1..21: mol_type = other RNA
tgctaagtgggtaagtgtgac

SEQ ID NO: 32672 - RNA, 21 nt, synthetic construct
  source 1..21: mol_type = other RNA
tggacagaagggtaaagctat

SEQ ID NO: 32673 - RNA, 21 nt, synthetic construct
  source 1..21: mol_type = other RNA
tgggtaagtgtgacttgataa

SEQ ID NO: 32674 - RNA, 21 nt, synthetic construct
  source 1..21: mol_type = other RNA
tgggtttctttaaggtttgga

SEQ ID NO: 32675 - RNA, 21 nt, synthetic construct
  source 1..21: mol_type = other RNA
tggtaaagaaggcaaaagttc

SEQ ID NO: 32676 - RNA, 21 nt, synthetic construct
  source 1..21: mol_type = other RNA
tgtatgtgtgtgtgtttctgt

SEQ ID NO: 32677 - RNA, 21 nt, synthetic construct
  source 1..21: mol_type = other RNA
tgtccaaaccttaaagaaacc

SEQ ID NO: 32678 - RNA, 21 nt, synthetic construct
  source 1..21: mol_type = other RNA
tgtcctattgctaagtgggta

SEQ ID NO: 32679 - RNA, 21 nt, synthetic construct
  source 1..21: mol_type = other RNA
tgtgacttgataaagcctttg

SEQ ID NO: 32680 - RNA, 21 nt, synthetic construct
  source 1..21: mol_type = other RNA
tgtgggtttctttaaggtttg

SEQ ID NO: 32681 - RNA, 21 nt, synthetic construct
  source 1..21: mol_type = other RNA
tgtgtgtgtgtttctgtgggt

SEQ ID NO: 32682 - RNA, 21 nt, synthetic construct
  source 1..21: mol_type = other RNA
tgtgtgtgtttctgtgggttt

SEQ ID NO: 32683 - RNA, 21 nt, synthetic construct
  source 1..21: mol_type = other RNA
tgtgtgtttctgtgggtttct

SEQ ID NO: 32684 - RNA, 21 nt, synthetic construct
  source 1..21: mol_type = other RNA
tgtgtttctgtgggtttcttt

SEQ ID NO: 32685 - RNA, 21 nt, synthetic construct
  source 1..21: mol_type = other RNA
tgtttctgtgggtttctttaa

SEQ ID NO: 32686 - RNA, 21 nt, synthetic construct
  source 1..21: mol_type = other RNA
ttaaagaaacccacagaaaca

SEQ ID NO: 32687 - RNA, 21 nt, synthetic construct
  source 1..21: mol_type = other RNA
ttaagaccaaaggctttatca

SEQ ID NO: 32688 - RNA, 21 nt, synthetic construct
  source 1..21: mol_type = other RNA
ttaaggtttggacagaagggt

SEQ ID NO: 32689 - RNA, 21 nt, synthetic construct
  source 1..21: mol_type = other RNA
ttaccagtatagatgactctt

SEQ ID NO: 32690 - RNA, 21 nt, synthetic construct
  source 1..21: mol_type = other RNA
ttacccacttagcaataggac

SEQ ID NO: 32691 - RNA, 21 nt, synthetic construct
  source 1..21: mol_type = other RNA
ttacccttctgtccaaacctt

SEQ ID NO: 32692 - RNA, 21 nt, synthetic construct
  source 1..21: mol_type = other RNA
ttagcaataggacatccctga

SEQ ID NO: 32693 - RNA, 21 nt, synthetic construct
  source 1..21: mol_type = other RNA
ttaggattgaaagagtcatct

SEQ ID NO: 32694 - RNA, 21 nt, synthetic construct
  source 1..21: mol_type = other RNA
ttatcaagtcacacttaccca

SEQ ID NO: 32695 - RNA, 21 nt, synthetic construct
  source 1..21: mol_type = other RNA
ttcaatcctaatagctttacc

SEQ ID NO: 32696 - RNA, 21 nt, synthetic construct
  source 1..21: mol_type = other RNA
ttctcagggatgtcctattgc

SEQ ID NO: 32697 - RNA, 21 nt, synthetic construct
  source 1..21: mol_type = other RNA
ttctgtccaaaccttaaagaa

SEQ ID NO: 32698 - RNA, 21 nt, synthetic construct
  source 1..21: mol_type = other RNA
ttctgtgggtttctttaaggt

SEQ ID NO: 32699 - RNA, 21 nt, synthetic construct
  source 1..21: mol_type = other RNA
ttctttaaggtttggacagaa

SEQ ID NO: 32700 - RNA, 21 nt, synthetic construct
  source 1..21: mol_type = other RNA
ttctttaccagtatagatgac

SEQ ID NO: 32701 - RNA, 21 nt, synthetic construct
  source 1..21: mol_type = other RNA
ttgaaagagtcatctatactg

SEQ ID NO: 32702 - RNA, 21 nt, synthetic construct
  source 1..21: mol_type = other RNA
ttgccttctttaccagtatag

SEQ ID NO: 32703 - RNA, 21 nt, synthetic construct
  source 1..21: mol_type = other RNA
ttgctaagtgggtaagtgtga

SEQ ID NO: 32704 - RNA, 21 nt, synthetic construct
  source 1..21: mol_type = other RNA
ttggacagaagggtaaagcta

SEQ ID NO: 32705 - RNA, 21 nt, synthetic construct
  source 1..21: mol_type = other RNA
ttgtatgtgtgtgtgtttctg

SEQ ID NO: 32706 - RNA, 21 nt, synthetic construct
  source 1..21: mol_type = other RNA
tttaagaccaaaggctttatc

SEQ ID NO: 32707 - RNA, 21 nt, synthetic construct
  source 1..21: mol_type = other RNA
tttaaggtttggacagaaggg

SEQ ID NO: 32708 - RNA, 21 nt, synthetic construct
  source 1..21: mol_type = other RNA
tttaccagtatagatgactct

SEQ ID NO: 32709 - RNA, 21 nt, synthetic construct
  source 1..21: mol_type = other RNA
tttacccttctgtccaaacct

SEQ ID NO: 32710 - RNA, 21 nt, synthetic construct
  source 1..21: mol_type = other RNA
tttatcaagtcacacttaccc

SEQ ID NO: 32711 - RNA, 21 nt, synthetic construct
  source 1..21: mol_type = other RNA
tttcaatcctaatagctttac

SEQ ID NO: 32712 - RNA, 21 nt, synthetic construct
  source 1..21: mol_type = other RNA
tttctgtgggtttctttaagg

SEQ ID NO: 32713 - RNA, 21 nt, synthetic construct
  source 1..21: mol_type = other RNA
tttctttaaggtttggacaga

SEQ ID NO: 32714 - RNA, 21 nt, synthetic construct
  source 1..21: mol_type = other RNA
tttgccttctttaccagtata

SEQ ID NO: 32715 - RNA, 21 nt, synthetic construct
  source 1..21: mol_type = other RNA
tttggacagaagggtaaagct

SEQ ID NO: 32716 - RNA, 21 nt, synthetic construct
  source 1..21: mol_type = other RNA
ttttgccttctttaccagtat

SEQ ID NO: 32717 - RNA, 22 nt, synthetic construct
  source 1..22: mol_type = other RNA
aaaagttctcagggatgtccta

SEQ ID NO: 32718 - RNA, 22 nt, synthetic construct
  source 1..22: mol_type = other RNA
aaacccacagaaacacacacac

SEQ ID NO: 32719 - RNA, 22 nt, synthetic construct
  source 1..22: mol_type = other RNA
aaaccttaaagaaacccacaga

SEQ ID NO: 32720 - RNA, 22 nt, synthetic construct
  source 1..22: mol_type = other RNA
aaagaaacccacagaaacacac

SEQ ID NO: 32721 - RNA, 22 nt, synthetic construct
  source 1..22: mol_type = other RNA
aaagaaggcaaaagttctcagg

SEQ ID NO: 32722 - RNA, 22 nt, synthetic construct
  source 1..22: mol_type = other RNA
aaagagtcatctatactggtaa

SEQ ID NO: 32723 - RNA, 22 nt, synthetic construct
  source 1..22: mol_type = other RNA
aaagctattaggattgaaagag

SEQ ID NO: 32724 - RNA, 22 nt, synthetic construct
  source 1..22: mol_type = other RNA
aaaggctttatcaagtcacact

SEQ ID NO: 32725 - RNA, 22 nt, synthetic construct
  source 1..22: mol_type = other RNA
aaagttctcagggatgtcctat

SEQ ID NO: 32726 - RNA, 22 nt, synthetic construct
  source 1..22: mol_type = other RNA
aacccacagaaacacacacaca

SEQ ID NO: 32727 - RNA, 22 nt, synthetic construct
  source 1..22: mol_type = other RNA
aaccttaaagaaacccacagaa

SEQ ID NO: 32728 - RNA, 22 nt, synthetic construct
  source 1..22: mol_type = other RNA
aacttttgccttctttaccagt

SEQ ID NO: 32729 - RNA, 22 nt, synthetic construct
  source 1..22: mol_type = other RNA
aagaaacccacagaaacacaca

SEQ ID NO: 32730 - RNA, 22 nt, synthetic construct
  source 1..22: mol_type = other RNA
aagaaggcaaaagttctcaggg

SEQ ID NO: 32731 - RNA, 22 nt, synthetic construct
  source 1..22: mol_type = other RNA
aagaccaaaggctttatcaagt

SEQ ID NO: 32732 - RNA, 22 nt, synthetic construct
  source 1..22: mol_type = other RNA
aagagtcatctatactggtaaa

SEQ ID NO: 32733 - RNA, 22 nt, synthetic construct
  source 1..22: mol_type = other RNA
aagatttaagaccaaaggcttt

SEQ ID NO: 32734 - RNA, 22 nt, synthetic construct
  source 1..22: mol_type = other RNA
aagctattaggattgaaagagt

SEQ ID NO: 32735 - RNA, 22 nt, synthetic construct
  source 1..22: mol_type = other RNA
aaggcaaaagttctcagggatg

SEQ ID NO: 32736 - RNA, 22 nt, synthetic construct
  source 1..22: mol_type = other RNA
aaggctttatcaagtcacactt

SEQ ID NO: 32737 - RNA, 22 nt, synthetic construct
  source 1..22: mol_type = other RNA
aagggtaaagctattaggattg

SEQ ID NO: 32738 - RNA, 22 nt, synthetic construct
  source 1..22: mol_type = other RNA
aaggtttggacagaagggtaaa

SEQ ID NO: 32739 - RNA, 22 nt, synthetic construct
  source 1..22: mol_type = other RNA
aagtcacacttacccacttagc

SEQ ID NO: 32740 - RNA, 22 nt, synthetic construct
  source 1..22: mol_type = other RNA
aagtgggtaagtgtgacttgat

SEQ ID NO: 32741 - RNA, 22 nt, synthetic construct
  source 1..22: mol_type = other RNA
aagtgtgacttgataaagcctt

SEQ ID NO: 32742 - RNA, 22 nt, synthetic construct
  source 1..22: mol_type = other RNA
aagttctcagggatgtcctatt

SEQ ID NO: 32743 - RNA, 22 nt, synthetic construct
  source 1..22: mol_type = other RNA
aatagctttacccttctgtcca

SEQ ID NO: 32744 - RNA, 22 nt, synthetic construct
  source 1..22: mol_type = other RNA
aataggacatccctgagaactt

SEQ ID NO: 32745 - RNA, 22 nt, synthetic construct
  source 1..22: mol_type = other RNA
aatcctaatagctttacccttc

SEQ ID NO: 32746 - RNA, 22 nt, synthetic construct
  source 1..22: mol_type = other RNA
aattgtatgtgtgtgtgtttct

SEQ ID NO: 32747 - RNA, 22 nt, synthetic construct
  source 1..22: mol_type = other RNA
acacttacccacttagcaatag

SEQ ID NO: 32748 - RNA, 22 nt, synthetic construct
  source 1..22: mol_type = other RNA
acagaagggtaaagctattagg

SEQ ID NO: 32749 - RNA, 22 nt, synthetic construct
  source 1..22: mol_type = other RNA
acatccctgagaacttttgcct

SEQ ID NO: 32750 - RNA, 22 nt, synthetic construct
  source 1..22: mol_type = other RNA
accaaaggctttatcaagtcac

SEQ ID NO: 32751 - RNA, 22 nt, synthetic construct
  source 1..22: mol_type = other RNA
accagtatagatgactctttca

SEQ ID NO: 32752 - RNA, 22 nt, synthetic construct
  source 1..22: mol_type = other RNA
acccacagaaacacacacacat

SEQ ID NO: 32753 - RNA, 22 nt, synthetic construct
  source 1..22: mol_type = other RNA
acccacttagcaataggacatc

SEQ ID NO: 32754 - RNA, 22 nt, synthetic construct
  source 1..22: mol_type = other RNA
acccttctgtccaaaccttaaa

SEQ ID NO: 32755 - RNA, 22 nt, synthetic construct
  source 1..22: mol_type = other RNA
accttaaagaaacccacagaaa

SEQ ID NO: 32756 - RNA, 22 nt, synthetic construct
  source 1..22: mol_type = other RNA
actctttcaatcctaatagctt

SEQ ID NO: 32757 - RNA, 22 nt, synthetic construct
  source 1..22: mol_type = other RNA
actggtaaagaaggcaaaagtt

SEQ ID NO: 32758 - RNA, 22 nt, synthetic construct
  source 1..22: mol_type = other RNA
acttacccacttagcaatagga

SEQ ID NO: 32759 - RNA, 22 nt, synthetic construct
  source 1..22: mol_type = other RNA
acttagcaataggacatccctg

SEQ ID NO: 32760 - RNA, 22 nt, synthetic construct
  source 1..22: mol_type = other RNA
acttttgccttctttaccagta

SEQ ID NO: 32761 - RNA, 22 nt, synthetic construct
  source 1..22: mol_type = other RNA
agaaacccacagaaacacacac

SEQ ID NO: 32762 - RNA, 22 nt, synthetic construct
  source 1..22: mol_type = other RNA
agaacttttgccttctttacca

SEQ ID NO: 32763 - RNA, 22 nt, synthetic construct
  source 1..22: mol_type = other RNA
agaaggcaaaagttctcaggga

SEQ ID NO: 32764 - RNA, 22 nt, synthetic construct
  source 1..22: mol_type = other RNA
agaagggtaaagctattaggat

SEQ ID NO: 32765 - RNA, 22 nt, synthetic construct
  source 1..22: mol_type = other RNA
agaccaaaggctttatcaagtc

SEQ ID NO: 32766 - RNA, 22 nt, synthetic construct
  source 1..22: mol_type = other RNA
agagtcatctatactggtaaag

SEQ ID NO: 32767 - RNA, 22 nt, synthetic construct
  source 1..22: mol_type = other RNA
agatgactctttcaatcctaat

SEQ ID NO: 32768 - RNA, 22 nt, synthetic construct
  source 1..22: mol_type = other RNA
agatttaagaccaaaggcttta

SEQ ID NO: 32769 - RNA, 22 nt, synthetic construct
  source 1..22: mol_type = other RNA
agcaataggacatccctgagaa

SEQ ID NO: 32770 - RNA, 22 nt, synthetic construct
  source 1..22: mol_type = other RNA
agctattaggattgaaagagtc

SEQ ID NO: 32771 - RNA, 22 nt, synthetic construct
  source 1..22: mol_type = other RNA
agctttacccttctgtccaaac

SEQ ID NO: 32772 - RNA, 22 nt, synthetic construct
  source 1..22: mol_type = other RNA
aggacatccctgagaacttttg

SEQ ID NO: 32773 - RNA, 22 nt, synthetic construct
  source 1..22: mol_type = other RNA
aggattgaaagagtcatctata

SEQ ID NO: 32774 - RNA, 22 nt, synthetic construct
  source 1..22: mol_type = other RNA
aggcaaaagttctcagggatgt

SEQ ID NO: 32775 - RNA, 22 nt, synthetic construct
  source 1..22: mol_type = other RNA
aggctttatcaagtcacactta

SEQ ID NO: 32776 - RNA, 22 nt, synthetic construct
  source 1..22: mol_type = other RNA
agggatgtcctattgctaagtg

SEQ ID NO: 32777 - RNA, 22 nt, synthetic construct
  source 1..22: mol_type = other RNA
agggtaaagctattaggattga

SEQ ID NO: 32778 - RNA, 22 nt, synthetic construct
  source 1..22: mol_type = other RNA
aggtttggacagaagggtaaag

SEQ ID NO: 32779 - RNA, 22 nt, synthetic construct
  source 1..22: mol_type = other RNA
agtatagatgactctttcaatc

SEQ ID NO: 32780 - RNA, 22 nt, synthetic construct
  source 1..22: mol_type = other RNA
agtcacacttacccacttagca

SEQ ID NO: 32781 - RNA, 22 nt, synthetic construct
  source 1..22: mol_type = other RNA
agtcatctatactggtaaagaa

SEQ ID NO: 32782 - RNA, 22 nt, synthetic construct
  source 1..22: mol_type = other RNA
agtgggtaagtgtgacttgata

SEQ ID NO: 32783 - RNA, 22 nt, synthetic construct
  source 1..22: mol_type = other RNA
agtgtgacttgataaagccttt

SEQ ID NO: 32784 - RNA, 22 nt, synthetic construct
  source 1..22: mol_type = other RNA
agttctcagggatgtcctattg

SEQ ID NO: 32785 - RNA, 22 nt, synthetic construct
  source 1..22: mol_type = other RNA
atactggtaaagaaggcaaaag

SEQ ID NO: 32786 - RNA, 22 nt, synthetic construct
  source 1..22: mol_type = other RNA
atagatgactctttcaatccta

SEQ ID NO: 32787 - RNA, 22 nt, synthetic construct
  source 1..22: mol_type = other RNA
atagctttacccttctgtccaa

SEQ ID NO: 32788 - RNA, 22 nt, synthetic construct
  source 1..22: mol_type = other RNA
ataggacatccctgagaacttt

SEQ ID NO: 32789 - RNA, 22 nt, synthetic construct
  source 1..22: mol_type = other RNA
atcaagtcacacttacccactt

SEQ ID NO: 32790 - RNA, 22 nt, synthetic construct
  source 1..22: mol_type = other RNA
atccctgagaacttttgccttc

SEQ ID NO: 32791 - RNA, 22 nt, synthetic construct
  source 1..22: mol_type = other RNA
atcctaatagctttacccttct

SEQ ID NO: 32792 - RNA, 22 nt, synthetic construct
  source 1..22: mol_type = other RNA
atctatactggtaaagaaggca

SEQ ID NO: 32793 - RNA, 22 nt, synthetic construct
  source 1..22: mol_type = other RNA
atgactctttcaatcctaatag

SEQ ID NO: 32794 - RNA, 22 nt, synthetic construct
  source 1..22: mol_type = other RNA
atgtcctattgctaagtgggta

SEQ ID NO: 32795 - RNA, 22 nt, synthetic construct
  source 1..22: mol_type = other RNA
atgtgtgtgtgtttctgtgggt

SEQ ID NO: 32796 - RNA, 22 nt, synthetic construct
  source 1..22: mol_type = other RNA
attaggattgaaagagtcatct

SEQ ID NO: 32797 - RNA, 22 nt, synthetic construct
  source 1..22: mol_type = other RNA
attgaaagagtcatctatactg

SEQ ID NO: 32798 - RNA, 22 nt, synthetic construct
  source 1..22: mol_type = other RNA
attgctaagtgggtaagtgtga

SEQ ID NO: 32799 - RNA, 22 nt, synthetic construct
  source 1..22: mol_type = other RNA
attgtatgtgtgtgtgtttctg

SEQ ID NO: 32800 - RNA, 22 nt, synthetic construct
  source 1..22: mol_type = other RNA
atttaagaccaaaggctttatc

SEQ ID NO: 32801 - RNA, 22 nt, synthetic construct
  source 1..22: mol_type = other RNA
caaaagttctcagggatgtcct

SEQ ID NO: 32802 - RNA, 22 nt, synthetic construct
  source 1..22: mol_type = other RNA
caaaccttaaagaaacccacag

SEQ ID NO: 32803 - RNA, 22 nt, synthetic construct
  source 1..22: mol_type = other RNA
caaaggctttatcaagtcacac

SEQ ID NO: 32804 - RNA, 22 nt, synthetic construct
  source 1..22: mol_type = other RNA
caagtcacacttacccacttag

SEQ ID NO: 32805 - RNA, 22 nt, synthetic construct
  source 1..22: mol_type = other RNA
caataggacatccctgagaact

SEQ ID NO: 32806 - RNA, 22 nt, synthetic construct
  source 1..22: mol_type = other RNA
caatcctaatagctttaccctt

SEQ ID NO: 32807 - RNA, 22 nt, synthetic construct
  source 1..22: mol_type = other RNA
cacacttacccacttagcaata

SEQ ID NO: 32808 - RNA, 22 nt, synthetic construct
  source 1..22: mol_type = other RNA
cacttacccacttagcaatagg

SEQ ID NO: 32809 - RNA, 22 nt, synthetic construct
  source 1..22: mol_type = other RNA
cacttagcaataggacatccct

SEQ ID NO: 32810 - RNA, 22 nt, synthetic construct
  source 1..22: mol_type = other RNA
cagaagggtaaagctattagga

SEQ ID NO: 32811 - RNA, 22 nt, synthetic construct
  source 1..22: mol_type = other RNA
cagggatgtcctattgctaagt

SEQ ID NO: 32812 - RNA, 22 nt, synthetic construct
  source 1..22: mol_type = other RNA
cagtatagatgactctttcaat

SEQ ID NO: 32813 - RNA, 22 nt, synthetic construct
  source 1..22: mol_type = other RNA
catccctgagaacttttgcctt

SEQ ID NO: 32814 - RNA, 22 nt, synthetic construct
  source 1..22: mol_type = other RNA
catctatactggtaaagaaggc

SEQ ID NO: 32815 - RNA, 22 nt, synthetic construct
  source 1..22: mol_type = other RNA
ccaaaccttaaagaaacccaca

SEQ ID NO: 32816 - RNA, 22 nt, synthetic construct
  source 1..22: mol_type = other RNA
ccaaaggctttatcaagtcaca

SEQ ID NO: 32817 - RNA, 22 nt, synthetic construct
  source 1..22: mol_type = other RNA
ccacttagcaataggacatccc

SEQ ID NO: 32818 - RNA, 22 nt, synthetic construct
  source 1..22: mol_type = other RNA
ccagtatagatgactctttcaa

SEQ ID NO: 32819 - RNA, 22 nt, synthetic construct
  source 1..22: mol_type = other RNA
cccacttagcaataggacatcc

SEQ ID NO: 32820 - RNA, 22 nt, synthetic construct
  source 1..22: mol_type = other RNA
ccctgagaacttttgccttctt

SEQ ID NO: 32821 - RNA, 22 nt, synthetic construct
  source 1..22: mol_type = other RNA
cccttctgtccaaaccttaaag

SEQ ID NO: 32822 - RNA, 22 nt, synthetic construct
  source 1..22: mol_type = other RNA
cctaatagctttacccttctgt

SEQ ID NO: 32823 - RNA, 22 nt, synthetic construct
  source 1..22: mol_type = other RNA
cctattgctaagtgggtaagtg

SEQ ID NO: 32824 - RNA, 22 nt, synthetic construct
  source 1..22: mol_type = other RNA
cctgagaacttttgccttcttt

SEQ ID NO: 32825 - RNA, 22 nt, synthetic construct
  source 1..22: mol_type = other RNA
ccttaaagaaacccacagaaac

SEQ ID NO: 32826 - RNA, 22 nt, synthetic construct
  source 1..22: mol_type = other RNA
ccttctgtccaaaccttaaaga

SEQ ID NO: 32827 - RNA, 22 nt, synthetic construct
  source 1..22: mol_type = other RNA
ccttctttaccagtatagatga

SEQ ID NO: 32828 - RNA, 22 nt, synthetic construct
  source 1..22: mol_type = other RNA
ctaagtgggtaagtgtgacttg

SEQ ID NO: 32829 - RNA, 22 nt, synthetic construct
  source 1..22: mol_type = other RNA
ctaatagctttacccttctgtc

SEQ ID NO: 32830 - RNA, 22 nt, synthetic construct
  source 1..22: mol_type = other RNA
ctaattgtatgtgtgtgtgttt

SEQ ID NO: 32831 - RNA, 22 nt, synthetic construct
  source 1..22: mol_type = other RNA
ctatactggtaaagaaggcaaa

SEQ ID NO: 32832 - RNA, 22 nt, synthetic construct
  source 1..22: mol_type = other RNA
ctattaggattgaaagagtcat

SEQ ID NO: 32833 - RNA, 22 nt, synthetic construct
  source 1..22: mol_type = other RNA
ctattgctaagtgggtaagtgt

SEQ ID NO: 32834 - RNA, 22 nt, synthetic construct
  source 1..22: mol_type = other RNA
ctcagggatgtcctattgctaa

SEQ ID NO: 32835 - RNA, 22 nt, synthetic construct
  source 1..22: mol_type = other RNA
ctctttcaatcctaatagcttt

SEQ ID NO: 32836 - RNA, 22 nt, synthetic construct
  source 1..22: mol_type = other RNA
ctgagaacttttgccttcttta

SEQ ID NO: 32837 - RNA, 22 nt, synthetic construct
  source 1..22: mol_type = other RNA
ctggtaaagaaggcaaaagttc

SEQ ID NO: 32838 - RNA, 22 nt, synthetic construct
  source 1..22: mol_type = other RNA
ctgtccaaaccttaaagaaacc

SEQ ID NO: 32839 - RNA, 22 nt, synthetic construct
  source 1..22: mol_type = other RNA
ctgtgggtttctttaaggtttg

SEQ ID NO: 32840 - RNA, 22 nt, synthetic construct
  source 1..22: mol_type = other RNA
cttaaagaaacccacagaaaca

SEQ ID NO: 32841 - RNA, 22 nt, synthetic construct
  source 1..22: mol_type = other RNA
cttacccacttagcaataggac

SEQ ID NO: 32842 - RNA, 22 nt, synthetic construct
  source 1..22: mol_type = other RNA
cttagcaataggacatccctga

SEQ ID NO: 32843 - RNA, 22 nt, synthetic construct
  source 1..22: mol_type = other RNA
cttctgtccaaaccttaaagaa

SEQ ID NO: 32844 - RNA, 22 nt, synthetic construct
  source 1..22: mol_type = other RNA
cttctttaccagtatagatgac

SEQ ID NO: 32845 - RNA, 22 nt, synthetic construct
  source 1..22: mol_type = other RNA
ctttaaggtttggacagaaggg

SEQ ID NO: 32846 - RNA, 22 nt, synthetic construct
  source 1..22: mol_type = other RNA
ctttaccagtatagatgactct

SEQ ID NO: 32847 - RNA, 22 nt, synthetic construct
  source 1..22: mol_type = other RNA
ctttacccttctgtccaaacct

SEQ ID NO: 32848 - RNA, 22 nt, synthetic construct
  source 1..22: mol_type = other RNA
ctttatcaagtcacacttaccc

SEQ ID NO: 32849 - RNA, 22 nt, synthetic construct
  source 1..22: mol_type = other RNA
ctttcaatcctaatagctttac

SEQ ID NO: 32850 - RNA, 22 nt, synthetic construct
  source 1..22: mol_type = other RNA
cttttgccttctttaccagtat

SEQ ID NO: 32851 - RNA, 22 nt, synthetic construct
  source 1..22: mol_type = other RNA
gaaacccacagaaacacacaca

SEQ ID NO: 32852 - RNA, 22 nt, synthetic construct
  source 1..22: mol_type = other RNA
gaaagagtcatctatactggta

SEQ ID NO: 32853 - RNA, 22 nt, synthetic construct
  source 1..22: mol_type = other RNA
gaacttttgccttctttaccag

SEQ ID NO: 32854 - RNA, 22 nt, synthetic construct
  source 1..22: mol_type = other RNA
gaaggcaaaagttctcagggat

SEQ ID NO: 32855 - RNA, 22 nt, synthetic construct
  source 1..22: mol_type = other RNA
gaagggtaaagctattaggatt

SEQ ID NO: 32856 - RNA, 22 nt, synthetic construct
  source 1..22: mol_type = other RNA
gacagaagggtaaagctattag

SEQ ID NO: 32857 - RNA, 22 nt, synthetic construct
  source 1..22: mol_type = other RNA
gacatccctgagaacttttgcc

SEQ ID NO: 32858 - RNA, 22 nt, synthetic construct
  source 1..22: mol_type = other RNA
gaccaaaggctttatcaagtca

SEQ ID NO: 32859 - RNA, 22 nt, synthetic construct
  source 1..22: mol_type = other RNA
gactctttcaatcctaatagct

SEQ ID NO: 32860 - RNA, 22 nt, synthetic construct
  source 1..22: mol_type = other RNA
gacttgataaagcctttggtct

SEQ ID NO: 32861 - RNA, 22 nt, synthetic construct
  source 1..22: mol_type = other RNA
gagaacttttgccttctttacc

SEQ ID NO: 32862 - RNA, 22 nt, synthetic construct
  source 1..22: mol_type = other RNA
gagtcatctatactggtaaaga

SEQ ID NO: 32863 - RNA, 22 nt, synthetic construct
  source 1..22: mol_type = other RNA
gatgactctttcaatcctaata

SEQ ID NO: 32864 - RNA, 22 nt, synthetic construct
  source 1..22: mol_type = other RNA
gatgtcctattgctaagtgggt

SEQ ID NO: 32865 - RNA, 22 nt, synthetic construct
  source 1..22: mol_type = other RNA
gattgaaagagtcatctatact

SEQ ID NO: 32866 - RNA, 22 nt, synthetic construct
  source 1..22: mol_type = other RNA
gatttaagaccaaaggctttat

SEQ ID NO: 32867 - RNA, 22 nt, synthetic construct
  source 1..22: mol_type = other RNA
gcaaaagttctcagggatgtcc

SEQ ID NO: 32868 - RNA, 22 nt, synthetic construct
  source 1..22: mol_type = other RNA
gcaataggacatccctgagaac

SEQ ID NO: 32869 - RNA, 22 nt, synthetic construct
  source 1..22: mol_type = other RNA
gccttctttaccagtatagatg

SEQ ID NO: 32870 - RNA, 22 nt, synthetic construct
  source 1..22: mol_type = other RNA
gctaagtgggtaagtgtgactt

SEQ ID NO: 32871 - RNA, 22 nt, synthetic construct
  source 1..22: mol_type = other RNA
gctattaggattgaaagagtca

SEQ ID NO: 32872 - RNA, 22 nt, synthetic construct
  source 1..22: mol_type = other RNA
gctttacccttctgtccaaacc

SEQ ID NO: 32873 - RNA, 22 nt, synthetic construct
  source 1..22: mol_type = other RNA
gctttatcaagtcacacttacc

SEQ ID NO: 32874 - RNA, 22 nt, synthetic construct
  source 1..22: mol_type = other RNA
ggacagaagggtaaagctatta

SEQ ID NO: 32875 - RNA, 22 nt, synthetic construct
  source 1..22: mol_type = other RNA
ggacatccctgagaacttttgc

SEQ ID NO: 32876 - RNA, 22 nt, synthetic construct
  source 1..22: mol_type = other RNA
ggatgtcctattgctaagtggg

SEQ ID NO: 32877 - RNA, 22 nt, synthetic construct
  source 1..22: mol_type = other RNA
ggattgaaagagtcatctatac

SEQ ID NO: 32878 - RNA, 22 nt, synthetic construct
  source 1..22: mol_type = other RNA
ggcaaaagttctcagggatgtc

SEQ ID NO: 32879 - RNA, 22 nt, synthetic construct
  source 1..22: mol_type = other RNA
ggctttatcaagtcacacttac

SEQ ID NO: 32880 - RNA, 22 nt, synthetic construct
  source 1..22: mol_type = other RNA
gggatgtcctattgctaagtgg

SEQ ID NO: 32881 - RNA, 22 nt, synthetic construct
  source 1..22: mol_type = other RNA
gggtaaagctattaggattgaa

SEQ ID NO: 32882 - RNA, 22 nt, synthetic construct
  source 1..22: mol_type = other RNA
gggtaagtgtgacttgataaag

SEQ ID NO: 32883 - RNA, 22 nt, synthetic construct
  source 1..22: mol_type = other RNA
gggtttctttaaggtttggaca

SEQ ID NO: 32884 - RNA, 22 nt, synthetic construct
  source 1..22: mol_type = other RNA
ggtaaagaaggcaaaagttctc

SEQ ID NO: 32885 - RNA, 22 nt, synthetic construct
  source 1..22: mol_type = other RNA
ggtaaagctattaggattgaaa

SEQ ID NO: 32886 - RNA, 22 nt, synthetic construct
  source 1..22: mol_type = other RNA
ggtaagtgtgacttgataaagc

SEQ ID NO: 32887 - RNA, 22 nt, synthetic construct
  source 1..22: mol_type = other RNA
ggtttctttaaggtttggacag

SEQ ID NO: 32888 - RNA, 22 nt, synthetic construct
  source 1..22: mol_type = other RNA
ggtttggacagaagggtaaagc

SEQ ID NO: 32889 - RNA, 22 nt, synthetic construct
  source 1..22: mol_type = other RNA
gtaaagaaggcaaaagttctca

SEQ ID NO: 32890 - RNA, 22 nt, synthetic construct
  source 1..22: mol_type = other RNA
gtaaagctattaggattgaaag

SEQ ID NO: 32891 - RNA, 22 nt, synthetic construct
  source 1..22: mol_type = other RNA
gtaagtgtgacttgataaagcc

SEQ ID NO: 32892 - RNA, 22 nt, synthetic construct
  source 1..22: mol_type = other RNA
gtatagatgactctttcaatcc

SEQ ID NO: 32893 - RNA, 22 nt, synthetic construct
  source 1..22: mol_type = other RNA
gtatgtgtgtgtgtttctgtgg

SEQ ID NO: 32894 - RNA, 22 nt, synthetic construct
  source 1..22: mol_type = other RNA
gtcacacttacccacttagcaa

SEQ ID NO: 32895 - RNA, 22 nt, synthetic construct
  source 1..22: mol_type = other RNA
gtcatctatactggtaaagaag

SEQ ID NO: 32896 - RNA, 22 nt, synthetic construct
  source 1..22: mol_type = other RNA
gtccaaaccttaaagaaaccca

SEQ ID NO: 32897 - RNA, 22 nt, synthetic construct
  source 1..22: mol_type = other RNA
gtcctattgctaagtgggtaag

SEQ ID NO: 32898 - RNA, 22 nt, synthetic construct
  source 1..22: mol_type = other RNA
gtgacttgataaagcctttggt

SEQ ID NO: 32899 - RNA, 22 nt, synthetic construct
  source 1..22: mol_type = other RNA
gtgggtaagtgtgacttgataa

SEQ ID NO: 32900 - RNA, 22 nt, synthetic construct
  source 1..22: mol_type = other RNA
gtgggtttctttaaggtttgga

SEQ ID NO: 32901 - RNA, 22 nt, synthetic construct
  source 1..22: mol_type = other RNA
gtgtgacttgataaagcctttg

SEQ ID NO: 32902 - RNA, 22 nt, synthetic construct
  source 1..22: mol_type = other RNA
gtgtgtgtgtttctgtgggttt

SEQ ID NO: 32903 - RNA, 22 nt, synthetic construct
  source 1..22: mol_type = other RNA
gtgtgtgtttctgtgggtttct

SEQ ID NO: 32904 - RNA, 22 nt, synthetic construct
  source 1..22: mol_type = other RNA
gtgtgtttctgtgggtttcttt

SEQ ID NO: 32905 - RNA, 22 nt, synthetic construct
  source 1..22: mol_type = other RNA
gtgtttctgtgggtttctttaa

SEQ ID NO: 32906 - RNA, 22 nt, synthetic construct
  source 1..22: mol_type = other RNA
gttctcagggatgtcctattgc

SEQ ID NO: 32907 - RNA, 22 nt, synthetic construct
  source 1..22: mol_type = other RNA
gtttctgtgggtttctttaagg

SEQ ID NO: 32908 - RNA, 22 nt, synthetic construct
  source 1..22: mol_type = other RNA
gtttctttaaggtttggacaga

SEQ ID NO: 32909 - RNA, 22 nt, synthetic construct
  source 1..22: mol_type = other RNA
gtttggacagaagggtaaagct

SEQ ID NO: 32910 - RNA, 22 nt, synthetic construct
  source 1..22: mol_type = other RNA
taaagaaacccacagaaacaca

SEQ ID NO: 32911 - RNA, 22 nt, synthetic construct
  source 1..22: mol_type = other RNA
taaagaaggcaaaagttctcag

SEQ ID NO: 32912 - RNA, 22 nt, synthetic construct
  source 1..22: mol_type = other RNA
taaagctattaggattgaaaga

SEQ ID NO: 32913 - RNA, 22 nt, synthetic construct
  source 1..22: mol_type = other RNA
taagaccaaaggctttatcaag

SEQ ID NO: 32914 - RNA, 22 nt, synthetic construct
  source 1..22: mol_type = other RNA
taaggtttggacagaagggtaa

SEQ ID NO: 32915 - RNA, 22 nt, synthetic construct
  source 1..22: mol_type = other RNA
taagtgggtaagtgtgacttga

SEQ ID NO: 32916 - RNA, 22 nt, synthetic construct
  source 1..22: mol_type = other RNA
taagtgtgacttgataaagcct

SEQ ID NO: 32917 - RNA, 22 nt, synthetic construct
  source 1..22: mol_type = other RNA
taatagctttacccttctgtcc

SEQ ID NO: 32918 - RNA, 22 nt, synthetic construct
  source 1..22: mol_type = other RNA
taattgtatgtgtgtgtgtttc

SEQ ID NO: 32919 - RNA, 22 nt, synthetic construct
  source 1..22: mol_type = other RNA
taccagtatagatgactctttc

SEQ ID NO: 32920 - RNA, 22 nt, synthetic construct
  source 1..22: mol_type = other RNA
tacccacttagcaataggacat

SEQ ID NO: 32921 - RNA, 22 nt, synthetic construct
  source 1..22: mol_type = other RNA
tacccttctgtccaaaccttaa

SEQ ID NO: 32922 - RNA, 22 nt, synthetic construct
  source 1..22: mol_type = other RNA
tactggtaaagaaggcaaaagt

SEQ ID NO: 32923 - RNA, 22 nt, synthetic construct
  source 1..22: mol_type = other RNA
tagatgactctttcaatcctaa

SEQ ID NO: 32924 - RNA, 22 nt, synthetic construct
  source 1..22: mol_type = other RNA
tagcaataggacatccctgaga

SEQ ID NO: 32925 - RNA, 22 nt, synthetic construct
  source 1..22: mol_type = other RNA
tagctttacccttctgtccaaa

SEQ ID NO: 32926 - RNA, 22 nt, synthetic construct
  source 1..22: mol_type = other RNA
taggacatccctgagaactttt

SEQ ID NO: 32927 - RNA, 22 nt, synthetic construct
  source 1..22: mol_type = other RNA
taggattgaaagagtcatctat

SEQ ID NO: 32928 - RNA, 22 nt, synthetic construct
  source 1..22: mol_type = other RNA
tatactggtaaagaaggcaaaa

SEQ ID NO: 32929 - RNA, 22 nt, synthetic construct
  source 1..22: mol_type = other RNA
tatagatgactctttcaatcct

SEQ ID NO: 32930 - RNA, 22 nt, synthetic construct
  source 1..22: mol_type = other RNA
tatcaagtcacacttacccact

SEQ ID NO: 32931 - RNA, 22 nt, synthetic construct
  source 1..22: mol_type = other RNA
tatgtgtgtgtgtttctgtggg

SEQ ID NO: 32932 - RNA, 22 nt, synthetic construct
  source 1..22: mol_type = other RNA
tattaggattgaaagagtcatc

SEQ ID NO: 32933 - RNA, 22 nt, synthetic construct
  source 1..22: mol_type = other RNA
tattgctaagtgggtaagtgtg

SEQ ID NO: 32934 - RNA, 22 nt, synthetic construct
  source 1..22: mol_type = other RNA
tcaagtcacacttacccactta

SEQ ID NO: 32935 - RNA, 22 nt, synthetic construct
  source 1..22: mol_type = other RNA
tcaatcctaatagctttaccct

SEQ ID NO: 32936 - RNA, 22 nt, synthetic construct
  source 1..22: mol_type = other RNA
tcacacttacccacttagcaat

SEQ ID NO: 32937 - RNA, 22 nt, synthetic construct
  source 1..22: mol_type = other RNA
tcagggatgtcctattgctaag

SEQ ID NO: 32938 - RNA, 22 nt, synthetic construct
  source 1..22: mol_type = other RNA
tcatctatactggtaaagaagg

SEQ ID NO: 32939 - RNA, 22 nt, synthetic construct
  source 1..22: mol_type = other RNA
tccaaaccttaaagaaacccac

SEQ ID NO: 32940 - RNA, 22 nt, synthetic construct
  source 1..22: mol_type = other RNA
tccctgagaacttttgccttct

SEQ ID NO: 32941 - RNA, 22 nt, synthetic construct
  source 1..22: mol_type = other RNA
tcctaatagctttacccttctg

SEQ ID NO: 32942 - RNA, 22 nt, synthetic construct
  source 1..22: mol_type = other RNA
tcctattgctaagtgggtaagt

SEQ ID NO: 32943 - RNA, 22 nt, synthetic construct
  source 1..22: mol_type = other RNA
tctatactggtaaagaaggcaa

SEQ ID NO: 32944 - RNA, 22 nt, synthetic construct
  source 1..22: mol_type = other RNA
tctcagggatgtcctattgcta

SEQ ID NO: 32945 - RNA, 22 nt, synthetic construct
  source 1..22: mol_type = other RNA
tctgtccaaaccttaaagaaac

SEQ ID NO: 32946 - RNA, 22 nt, synthetic construct
  source 1..22: mol_type = other RNA
tctgtgggtttctttaaggttt

SEQ ID NO: 32947 - RNA, 22 nt, synthetic construct
  source 1..22: mol_type = other RNA
tctttaaggtttggacagaagg

SEQ ID NO: 32948 - RNA, 22 nt, synthetic construct
  source 1..22: mol_type = other RNA
tctttaccagtatagatgactc

SEQ ID NO: 32949 - RNA, 22 nt, synthetic construct
  source 1..22: mol_type = other RNA
tctttcaatcctaatagcttta

SEQ ID NO: 32950 - RNA, 22 nt, synthetic construct
  source 1..22: mol_type = other RNA
tgaaagagtcatctatactggt

SEQ ID NO: 32951 - RNA, 22 nt, synthetic construct
  source 1..22: mol_type = other RNA
tgactctttcaatcctaatagc

SEQ ID NO: 32952 - RNA, 22 nt, synthetic construct
  source 1..22: mol_type = other RNA
tgacttgataaagcctttggtc

SEQ ID NO: 32953 - RNA, 22 nt, synthetic construct
  source 1..22: mol_type = other RNA
tgagaacttttgccttctttac

SEQ ID NO: 32954 - RNA, 22 nt, synthetic construct
  source 1..22: mol_type = other RNA
tgccttctttaccagtatagat

SEQ ID NO: 32955 - RNA, 22 nt, synthetic construct
  source 1..22: mol_type = other RNA
tgctaagtgggtaagtgtgact

SEQ ID NO: 32956 - RNA, 22 nt, synthetic construct
  source 1..22: mol_type = other RNA
tggacagaagggtaaagctatt

SEQ ID NO: 32957 - RNA, 22 nt, synthetic construct
  source 1..22: mol_type = other RNA
tgggtaagtgtgacttgataaa

SEQ ID NO: 32958 - RNA, 22 nt, synthetic construct
  source 1..22: mol_type = other RNA
tgggtttctttaaggtttggac

SEQ ID NO: 32959 - RNA, 22 nt, synthetic construct
  source 1..22: mol_type = other RNA
tggtaaagaaggcaaaagttct

SEQ ID NO: 32960 - RNA, 22 nt, synthetic construct
  source 1..22: mol_type = other RNA
tgtatgtgtgtgtgtttctgtg

SEQ ID NO: 32961 - RNA, 22 nt, synthetic construct
  source 1..22: mol_type = other RNA
tgtccaaaccttaaagaaaccc

SEQ ID NO: 32962 - RNA, 22 nt, synthetic construct
  source 1..22: mol_type = other RNA
tgtcctattgctaagtgggtaa

SEQ ID NO: 32963 - RNA, 22 nt, synthetic construct
  source 1..22: mol_type = other RNA
tgtgacttgataaagcctttgg

SEQ ID NO: 32964 - RNA, 22 nt, synthetic construct
  source 1..22: mol_type = other RNA
tgtgggtttctttaaggtttgg

SEQ ID NO: 32965 - RNA, 22 nt, synthetic construct
  source 1..22: mol_type = other RNA
tgtgtgtgtgtttctgtgggtt

SEQ ID NO: 32966 - RNA, 22 nt, synthetic construct
  source 1..22: mol_type = other RNA
tgtgtgtgtttctgtgggtttc

SEQ ID NO: 32967 - RNA, 22 nt, synthetic construct
  source 1..22: mol_type = other RNA
tgtgtgtttctgtgggtttctt

SEQ ID NO: 32968 - RNA, 22 nt, synthetic construct
  source 1..22: mol_type = other RNA
tgtgtttctgtgggtttcttta

SEQ ID NO: 32969 - RNA, 22 nt, synthetic construct
  source 1..22: mol_type = other RNA
tgtttctgtgggtttctttaag

SEQ ID NO: 32970 - RNA, 22 nt, synthetic construct
  source 1..22: mol_type = other RNA
ttaaagaaacccacagaaacac

SEQ ID NO: 32971 - RNA, 22 nt, synthetic construct
  source 1..22: mol_type = other RNA
ttaagaccaaaggctttatcaa

SEQ ID NO: 32972 - RNA, 22 nt, synthetic construct
  source 1..22: mol_type = other RNA
ttaaggtttggacagaagggta

SEQ ID NO: 32973 - RNA, 22 nt, synthetic construct
  source 1..22: mol_type = other RNA
ttaccagtatagatgactcttt

SEQ ID NO: 32974 - RNA, 22 nt, synthetic construct
  source 1..22: mol_type = other RNA
ttacccacttagcaataggaca

SEQ ID NO: 32975 - RNA, 22 nt, synthetic construct
  source 1..22: mol_type = other RNA
ttacccttctgtccaaacctta

SEQ ID NO: 32976 - RNA, 22 nt, synthetic construct
  source 1..22: mol_type = other RNA
ttagcaataggacatccctgag

SEQ ID NO: 32977 - RNA, 22 nt, synthetic construct
  source 1..22: mol_type = other RNA
ttaggattgaaagagtcatcta

SEQ ID NO: 32978 - RNA, 22 nt, synthetic construct
  source 1..22: mol_type = other RNA
ttatcaagtcacacttacccac

SEQ ID NO: 32979 - RNA, 22 nt, synthetic construct
  source 1..22: mol_type = other RNA
ttcaatcctaatagctttaccc

SEQ ID NO: 32980 - RNA, 22 nt, synthetic construct
  source 1..22: mol_type = other RNA
ttctcagggatgtcctattgct

SEQ ID NO: 32981 - RNA, 22 nt, synthetic construct
  source 1..22: mol_type = other RNA
ttctgtccaaaccttaaagaaa

SEQ ID NO: 32982 - RNA, 22 nt, synthetic construct
  source 1..22: mol_type = other RNA
ttctgtgggtttctttaaggtt

SEQ ID NO: 32983 - RNA, 22 nt, synthetic construct
  source 1..22: mol_type = other RNA
ttctttaaggtttggacagaag

SEQ ID NO: 32984 - RNA, 22 nt, synthetic construct
  source 1..22: mol_type = other RNA
ttctttaccagtatagatgact

SEQ ID NO: 32985 - RNA, 22 nt, synthetic construct
  source 1..22: mol_type = other RNA
ttgaaagagtcatctatactgg

SEQ ID NO: 32986 - RNA, 22 nt, synthetic construct
  source 1..22: mol_type = other RNA
ttgccttctttaccagtataga

SEQ ID NO: 32987 - RNA, 22 nt, synthetic construct
  source 1..22: mol_type = other RNA
ttgctaagtgggtaagtgtgac

SEQ ID NO: 32988 - RNA, 22 nt, synthetic construct
  source 1..22: mol_type = other RNA
ttggacagaagggtaaagctat

SEQ ID NO: 32989 - RNA, 22 nt, synthetic construct
  source 1..22: mol_type = other RNA
ttgtatgtgtgtgtgtttctgt

SEQ ID NO: 32990 - RNA, 22 nt, synthetic construct
  source 1..22: mol_type = other RNA
tttaagaccaaaggctttatca

SEQ ID NO: 32991 - RNA, 22 nt, synthetic construct
  source 1..22: mol_type = other RNA
tttaaggtttggacagaagggt

SEQ ID NO: 32992 - RNA, 22 nt, synthetic construct
  source 1..22: mol_type = other RNA
tttaccagtatagatgactctt

SEQ ID NO: 32993 - RNA, 22 nt, synthetic construct
  source 1..22: mol_type = other RNA
tttacccttctgtccaaacctt

SEQ ID NO: 32994 - RNA, 22 nt, synthetic construct
  source 1..22: mol_type = other RNA
tttatcaagtcacacttaccca

SEQ ID NO: 32995 - RNA, 22 nt, synthetic construct
  source 1..22: mol_type = other RNA
tttcaatcctaatagctttacc

SEQ ID NO: 32996 - RNA, 22 nt, synthetic construct
  source 1..22: mol_type = other RNA
tttctgtgggtttctttaaggt

SEQ ID NO: 32997 - RNA, 22 nt, synthetic construct
  source 1..22: mol_type = other RNA
tttctttaaggtttggacagaa

SEQ ID NO: 32998 - RNA, 22 nt, synthetic construct
  source 1..22: mol_type = other RNA
tttgccttctttaccagtatag

SEQ ID NO: 32999 - RNA, 22 nt, synthetic construct
  source 1..22: mol_type = other RNA
tttggacagaagggtaaagcta

SEQ ID NO: 33000 - RNA, 22 nt, synthetic construct
  source 1..22: mol_type = other RNA
ttttgccttctttaccagtata

SEQ ID NO: 33001 - RNA, 20 nt, synthetic construct
  source 1..20: mol_type = other RNA
aaacacagtagcttctcttc

SEQ ID NO: 33002 - RNA, 20 nt, synthetic construct
  source 1..20: mol_type = other RNA
aaactctactcggagcttac

SEQ ID NO: 33003 - RNA, 20 nt, synthetic construct
  source 1..20: mol_type = other RNA
aaagaggggagaggccctgg

SEQ ID NO: 33004 - RNA, 20 nt, synthetic construct
  source 1..20: mol_type = other RNA
aaatacggcacgctcaccaa

SEQ ID NO: 33005 - RNA, 20 nt, synthetic construct
  source 1..20: mol_type = other RNA
aacacagtagcttctcttca

SEQ ID NO: 33006 - RNA, 20 nt, synthetic construct
  source 1..20: mol_type = other RNA
aaccacctgcgtggatcacc

SEQ ID NO: 33007 - RNA, 20 nt, synthetic construct
  source 1..20: mol_type = other RNA
aactctactcggagcttacc

SEQ ID NO: 33008 - RNA, 20 nt, synthetic construct
  source 1..20: mol_type = other RNA
aagagaagctactgtgtttg

SEQ ID NO: 33009 - RNA, 20 nt, synthetic construct
  source 1..20: mol_type = other RNA
aagaggggagaggccctggg

SEQ ID NO: 33010 - RNA, 20 nt, synthetic construct
  source 1..20: mol_type = other RNA
aagagtaagtgaagcccagg

SEQ ID NO: 33011 - RNA, 20 nt, synthetic construct
  source 1..20: mol_type = other RNA
aagcagcagtgaagagaagc

SEQ ID NO: 33012 - RNA, 20 nt, synthetic construct
  source 1..20: mol_type = other RNA
aagcccagggcctctcccct

SEQ ID NO: 33013 - RNA, 20 nt, synthetic construct
  source 1..20: mol_type = other RNA
aagctactgtgtttggtgcg

SEQ ID NO: 33014 - RNA, 20 nt, synthetic construct
  source 1..20: mol_type = other RNA
aagctccgagtagagtttgt

SEQ ID NO: 33015 - RNA, 20 nt, synthetic construct
  source 1..20: mol_type = other RNA
aaggaatcccgctgtctctg

SEQ ID NO: 33016 - RNA, 20 nt, synthetic construct
  source 1..20: mol_type = other RNA
aaggcacaccggcgattggt

SEQ ID NO: 33017 - RNA, 20 nt, synthetic construct
  source 1..20: mol_type = other RNA
aagtgaagcccagggcctct

SEQ ID NO: 33018 - RNA, 20 nt, synthetic construct
  source 1..20: mol_type = other RNA
aatacggcacgctcaccaat

SEQ ID NO: 33019 - RNA, 20 nt, synthetic construct
  source 1..20: mol_type = other RNA
aatcacaatcactgcagcct

SEQ ID NO: 33020 - RNA, 20 nt, synthetic construct
  source 1..20: mol_type = other RNA
aatcactgcagcctcacagg

SEQ ID NO: 33021 - RNA, 20 nt, synthetic construct
  source 1..20: mol_type = other RNA
aatcccgctgtctctggctg

SEQ ID NO: 33022 - RNA, 20 nt, synthetic construct
  source 1..20: mol_type = other RNA
aatcgccggtgtgccttgaa

SEQ ID NO: 33023 - RNA, 20 nt, synthetic construct
  source 1..20: mol_type = other RNA
aatgaagagtaagtgaagcc

SEQ ID NO: 33024 - RNA, 20 nt, synthetic construct
  source 1..20: mol_type = other RNA
aatggtgatccacgcaggtg

SEQ ID NO: 33025 - RNA, 20 nt, synthetic construct
  source 1..20: mol_type = other RNA
acaaactctactcggagctt

SEQ ID NO: 33026 - RNA, 20 nt, synthetic construct
  source 1..20: mol_type = other RNA
acaatcactgcagcctcaca

SEQ ID NO: 33027 - RNA, 20 nt, synthetic construct
  source 1..20: mol_type = other RNA
acacagtagcttctcttcac

SEQ ID NO: 33028 - RNA, 20 nt, synthetic construct
  source 1..20: mol_type = other RNA
acaccaggatgagaatcaca

SEQ ID NO: 33029 - RNA, 20 nt, synthetic construct
  source 1..20: mol_type = other RNA
acaccggcgattggtgagcg

SEQ ID NO: 33030 - RNA, 20 nt, synthetic construct
  source 1..20: mol_type = other RNA
acacctgtgaggctgcagtg

SEQ ID NO: 33031 - RNA, 20 nt, synthetic construct
  source 1..20: mol_type = other RNA
acagcgggattccttcccac

SEQ ID NO: 33032 - RNA, 20 nt, synthetic construct
  source 1..20: mol_type = other RNA
acaggtgtggccagctcgct

SEQ ID NO: 33033 - RNA, 20 nt, synthetic construct
  source 1..20: mol_type = other RNA
acagtagcttctcttcactg

SEQ ID NO: 33034 - RNA, 20 nt, synthetic construct
  source 1..20: mol_type = other RNA
accaaacacagtagcttctc

SEQ ID NO: 33035 - RNA, 20 nt, synthetic construct
  source 1..20: mol_type = other RNA
accaatcgccggtgtgcctt

SEQ ID NO: 33036 - RNA, 20 nt, synthetic construct
  source 1..20: mol_type = other RNA
accacctgcgtggatcacca

SEQ ID NO: 33037 - RNA, 20 nt, synthetic construct
  source 1..20: mol_type = other RNA
accaggatgagaatcacaat

SEQ ID NO: 33038 - RNA, 20 nt, synthetic construct
  source 1..20: mol_type = other RNA
accattccatcccaaacacc

SEQ ID NO: 33039 - RNA, 20 nt, synthetic construct
  source 1..20: mol_type = other RNA
accgagacgctgaggaaata

SEQ ID NO: 33040 - RNA, 20 nt, synthetic construct
  source 1..20: mol_type = other RNA
accggcgattggtgagcgtg

SEQ ID NO: 33041 - RNA, 20 nt, synthetic construct
  source 1..20: mol_type = other RNA
acctgcgtggatcaccattc

SEQ ID NO: 33042 - RNA, 20 nt, synthetic construct
  source 1..20: mol_type = other RNA
acctgtgaggctgcagtgat

SEQ ID NO: 33043 - RNA, 20 nt, synthetic construct
  source 1..20: mol_type = other RNA
acgcaggtggttcgcagaag

SEQ ID NO: 33044 - RNA, 20 nt, synthetic construct
  source 1..20: mol_type = other RNA
acgctcaccaatcgccggtg

SEQ ID NO: 33045 - RNA, 20 nt, synthetic construct
  source 1..20: mol_type = other RNA
acgctgaggaaatacggcac

SEQ ID NO: 33046 - RNA, 20 nt, synthetic construct
  source 1..20: mol_type = other RNA
acggcacgctcaccaatcgc

SEQ ID NO: 33047 - RNA, 20 nt, synthetic construct
  source 1..20: mol_type = other RNA
actcggagcttaccgagacg

SEQ ID NO: 33048 - RNA, 20 nt, synthetic construct
  source 1..20: mol_type = other RNA
actctactcggagcttaccg

SEQ ID NO: 33049 - RNA, 20 nt, synthetic construct
  source 1..20: mol_type = other RNA
actcttcattcaaggcacac

SEQ ID NO: 33050 - RNA, 20 nt, synthetic construct
  source 1..20: mol_type = other RNA
actgcagcctcacaggtgtg

SEQ ID NO: 33051 - RNA, 20 nt, synthetic construct
  source 1..20: mol_type = other RNA
actgctgcttctgcgaacca

SEQ ID NO: 33052 - RNA, 20 nt, synthetic construct
  source 1..20: mol_type = other RNA
actgtgtttggtgcgggagc

SEQ ID NO: 33053 - RNA, 20 nt, synthetic construct
  source 1..20: mol_type = other RNA
acttactcttcattcaaggc

SEQ ID NO: 33054 - RNA, 20 nt, synthetic construct
  source 1..20: mol_type = other RNA
agaagcagcagtgaagagaa

SEQ ID NO: 33055 - RNA, 20 nt, synthetic construct
  source 1..20: mol_type = other RNA
agaagctactgtgtttggtg

SEQ ID NO: 33056 - RNA, 20 nt, synthetic construct
  source 1..20: mol_type = other RNA
agaatcacaatcactgcagc

SEQ ID NO: 33057 - RNA, 20 nt, synthetic construct
  source 1..20: mol_type = other RNA
agacagcgggattccttccc

SEQ ID NO: 33058 - RNA, 20 nt, synthetic construct
  source 1..20: mol_type = other RNA
agacgctgaggaaatacggc

SEQ ID NO: 33059 - RNA, 20 nt, synthetic construct
  source 1..20: mol_type = other RNA
agagaagctactgtgtttgg

SEQ ID NO: 33060 - RNA, 20 nt, synthetic construct
  source 1..20: mol_type = other RNA
agagacagcgggattccttc

SEQ ID NO: 33061 - RNA, 20 nt, synthetic construct
  source 1..20: mol_type = other RNA
agaggccctgggcttcactt

SEQ ID NO: 33062 - RNA, 20 nt, synthetic construct
  source 1..20: mol_type = other RNA
agaggggagaggccctgggc

SEQ ID NO: 33063 - RNA, 20 nt, synthetic construct
  source 1..20: mol_type = other RNA
agagtaagtgaagcccaggg

SEQ ID NO: 33064 - RNA, 20 nt, synthetic construct
  source 1..20: mol_type = other RNA
agagtttgtcagccagagac

SEQ ID NO: 33065 - RNA, 20 nt, synthetic construct
  source 1..20: mol_type = other RNA
agcagcagtgaagagaagct

SEQ ID NO: 33066 - RNA, 20 nt, synthetic construct
  source 1..20: mol_type = other RNA
agcagtgaagagaagctact

SEQ ID NO: 33067 - RNA, 20 nt, synthetic construct
  source 1..20: mol_type = other RNA
agccagagacagcgggattc

SEQ ID NO: 33068 - RNA, 20 nt, synthetic construct
  source 1..20: mol_type = other RNA
agcccagggcctctcccctc

SEQ ID NO: 33069 - RNA, 20 nt, synthetic construct
  source 1..20: mol_type = other RNA
agcctcacaggtgtggccag

SEQ ID NO: 33070 - RNA, 20 nt, synthetic construct
  source 1..20: mol_type = other RNA
agcgagctggccacacctgt

SEQ ID NO: 33071 - RNA, 20 nt, synthetic construct
  source 1..20: mol_type = other RNA
agcgggattccttcccacac

SEQ ID NO: 33072 - RNA, 20 nt, synthetic construct
  source 1..20: mol_type = other RNA
agcgtctcggtaagctccga

SEQ ID NO: 33073 - RNA, 20 nt, synthetic construct
  source 1..20: mol_type = other RNA
agcgtgccgtatttcctcag

SEQ ID NO: 33074 - RNA, 20 nt, synthetic construct
  source 1..20: mol_type = other RNA
agctactgtgtttggtgcgg

SEQ ID NO: 33075 - RNA, 20 nt, synthetic construct
  source 1..20: mol_type = other RNA
agctccgagtagagtttgtc

SEQ ID NO: 33076 - RNA, 20 nt, synthetic construct
  source 1..20: mol_type = other RNA
agctcgctcccgcaccaaac

SEQ ID NO: 33077 - RNA, 20 nt, synthetic construct
  source 1..20: mol_type = other RNA
agctggccacacctgtgagg

SEQ ID NO: 33078 - RNA, 20 nt, synthetic construct
  source 1..20: mol_type = other RNA
agcttaccgagacgctgagg

SEQ ID NO: 33079 - RNA, 20 nt, synthetic construct
  source 1..20: mol_type = other RNA
agcttctcttcactgctgct

SEQ ID NO: 33080 - RNA, 20 nt, synthetic construct
  source 1..20: mol_type = other RNA
aggaaatacggcacgctcac

SEQ ID NO: 33081 - RNA, 20 nt, synthetic construct
  source 1..20: mol_type = other RNA
aggaatcccgctgtctctgg

SEQ ID NO: 33082 - RNA, 20 nt, synthetic construct
  source 1..20: mol_type = other RNA
aggatgagaatcacaatcac

SEQ ID NO: 33083 - RNA, 20 nt, synthetic construct
  source 1..20: mol_type = other RNA
aggcacaccggcgattggtg

SEQ ID NO: 33084 - RNA, 20 nt, synthetic construct
  source 1..20: mol_type = other RNA
aggccctgggcttcacttac

SEQ ID NO: 33085 - RNA, 20 nt, synthetic construct
  source 1..20: mol_type = other RNA
aggctgcagtgattgtgatt

SEQ ID NO: 33086 - RNA, 20 nt, synthetic construct
  source 1..20: mol_type = other RNA
aggggagaggccctgggctt

SEQ ID NO: 33087 - RNA, 20 nt, synthetic construct
  source 1..20: mol_type = other RNA
aggtggttcgcagaagcagc

SEQ ID NO: 33088 - RNA, 20 nt, synthetic construct
  source 1..20: mol_type = other RNA
aggtgtggccagctcgctcc

SEQ ID NO: 33089 - RNA, 20 nt, synthetic construct
  source 1..20: mol_type = other RNA
agtaagtgaagcccagggcc

SEQ ID NO: 33090 - RNA, 20 nt, synthetic construct
  source 1..20: mol_type = other RNA
agtagagtttgtcagccaga

SEQ ID NO: 33091 - RNA, 20 nt, synthetic construct
  source 1..20: mol_type = other RNA
agtagcttctcttcactgct

SEQ ID NO: 33092 - RNA, 20 nt, synthetic construct
  source 1..20: mol_type = other RNA
agtgaagagaagctactgtg

SEQ ID NO: 33093 - RNA, 20 nt, synthetic construct
  source 1..20: mol_type = other RNA
agtgaagcccagggcctctc

SEQ ID NO: 33094 - RNA, 20 nt, synthetic construct
  source 1..20: mol_type = other RNA
agtgattgtgattctcatcc

SEQ ID NO: 33095 - RNA, 20 nt, synthetic construct
  source 1..20: mol_type = other RNA
agtttgtcagccagagacag

SEQ ID NO: 33096 - RNA, 20 nt, synthetic construct
  source 1..20: mol_type = other RNA
atacggcacgctcaccaatc

SEQ ID NO: 33097 - RNA, 20 nt, synthetic construct
  source 1..20: mol_type = other RNA
atcacaatcactgcagcctc

SEQ ID NO: 33098 - RNA, 20 nt, synthetic construct
  source 1..20: mol_type = other RNA
atcaccattccatcccaaac

SEQ ID NO: 33099 - RNA, 20 nt, synthetic construct
  source 1..20: mol_type = other RNA
atcactgcagcctcacaggt

SEQ ID NO: 33100 - RNA, 20 nt, synthetic construct
  source 1..20: mol_type = other RNA
atccacgcaggtggttcgca

SEQ ID NO: 33101 - RNA, 20 nt, synthetic construct
  source 1..20: mol_type = other RNA
atcccgctgtctctggctga

SEQ ID NO: 33102 - RNA, 20 nt, synthetic construct
  source 1..20: mol_type = other RNA
atcctggtgtgggaaggaat

SEQ ID NO: 33103 - RNA, 20 nt, synthetic construct
  source 1..20: mol_type = other RNA
atcgccggtgtgccttgaat

SEQ ID NO: 33104 - RNA, 20 nt, synthetic construct
  source 1..20: mol_type = other RNA
atgaagagtaagtgaagccc

SEQ ID NO: 33105 - RNA, 20 nt, synthetic construct
  source 1..20: mol_type = other RNA
atgagaatcacaatcactgc

SEQ ID NO: 33106 - RNA, 20 nt, synthetic construct
  source 1..20: mol_type = other RNA
atggaatggtgatccacgca

SEQ ID NO: 33107 - RNA, 20 nt, synthetic construct
  source 1..20: mol_type = other RNA
atggtgatccacgcaggtgg

SEQ ID NO: 33108 - RNA, 20 nt, synthetic construct
  source 1..20: mol_type = other RNA
attcaaggcacaccggcgat

SEQ ID NO: 33109 - RNA, 20 nt, synthetic construct
  source 1..20: mol_type = other RNA
attccttcccacaccaggat

SEQ ID NO: 33110 - RNA, 20 nt, synthetic construct
  source 1..20: mol_type = other RNA
attctcatcctggtgtggga

SEQ ID NO: 33111 - RNA, 20 nt, synthetic construct
  source 1..20: mol_type = other RNA
attggtgagcgtgccgtatt

SEQ ID NO: 33112 - RNA, 20 nt, synthetic construct
  source 1..20: mol_type = other RNA
attgtgattctcatcctggt

SEQ ID NO: 33113 - RNA, 20 nt, synthetic construct
  source 1..20: mol_type = other RNA
atttcctcagcgtctcggta

SEQ ID NO: 33114 - RNA, 20 nt, synthetic construct
  source 1..20: mol_type = other RNA
caaacacagtagcttctctt

SEQ ID NO: 33115 - RNA, 20 nt, synthetic construct
  source 1..20: mol_type = other RNA
caaactctactcggagctta

SEQ ID NO: 33116 - RNA, 20 nt, synthetic construct
  source 1..20: mol_type = other RNA
caaagaggggagaggccctg

SEQ ID NO: 33117 - RNA, 20 nt, synthetic construct
  source 1..20: mol_type = other RNA
caaggcacaccggcgattgg

SEQ ID NO: 33118 - RNA, 20 nt, synthetic construct
  source 1..20: mol_type = other RNA
caatcactgcagcctcacag

SEQ ID NO: 33119 - RNA, 20 nt, synthetic construct
  source 1..20: mol_type = other RNA
caatcgccggtgtgccttga

SEQ ID NO: 33120 - RNA, 20 nt, synthetic construct
  source 1..20: mol_type = other RNA
cacaatcactgcagcctcac

SEQ ID NO: 33121 - RNA, 20 nt, synthetic construct
  source 1..20: mol_type = other RNA
cacaccaggatgagaatcac

SEQ ID NO: 33122 - RNA, 20 nt, synthetic construct
  source 1..20: mol_type = other RNA
cacaccggcgattggtgagc

SEQ ID NO: 33123 - RNA, 20 nt, synthetic construct
  source 1..20: mol_type = other RNA
cacacctgtgaggctgcagt

SEQ ID NO: 33124 - RNA, 20 nt, synthetic construct
  source 1..20: mol_type = other RNA
cacaggtgtggccagctcgc

SEQ ID NO: 33125 - RNA, 20 nt, synthetic construct
  source 1..20: mol_type = other RNA
cacagtagcttctcttcact

SEQ ID NO: 33126 - RNA, 20 nt, synthetic construct
  source 1..20: mol_type = other RNA
caccaaacacagtagcttct

SEQ ID NO: 33127 - RNA, 20 nt, synthetic construct
  source 1..20: mol_type = other RNA
caccaatcgccggtgtgcct

SEQ ID NO: 33128 - RNA, 20 nt, synthetic construct
  source 1..20: mol_type = other RNA
caccaggatgagaatcacaa

SEQ ID NO: 33129 - RNA, 20 nt, synthetic construct
  source 1..20: mol_type = other RNA
caccattccatcccaaacac

SEQ ID NO: 33130 - RNA, 20 nt, synthetic construct
  source 1..20: mol_type = other RNA
caccggcgattggtgagcgt

SEQ ID NO: 33131 - RNA, 20 nt, synthetic construct
  source 1..20: mol_type = other RNA
cacctgcgtggatcaccatt

SEQ ID NO: 33132 - RNA, 20 nt, synthetic construct
  source 1..20: mol_type = other RNA
cacctgtgaggctgcagtga

SEQ ID NO: 33133 - RNA, 20 nt, synthetic construct
  source 1..20: mol_type = other RNA
cacgcaggtggttcgcagaa

SEQ ID NO: 33134 - RNA, 20 nt, synthetic construct
  source 1..20: mol_type = other RNA
cacgctcaccaatcgccggt

SEQ ID NO: 33135 - RNA, 20 nt, synthetic construct
  source 1..20: mol_type = other RNA
cactgcagcctcacaggtgt

SEQ ID NO: 33136 - RNA, 20 nt, synthetic construct
  source 1..20: mol_type = other RNA
cactgctgcttctgcgaacc

SEQ ID NO: 33137 - RNA, 20 nt, synthetic construct
  source 1..20: mol_type = other RNA
cacttactcttcattcaagg

SEQ ID NO: 33138 - RNA, 20 nt, synthetic construct
  source 1..20: mol_type = other RNA
cagaagcagcagtgaagaga

SEQ ID NO: 33139 - RNA, 20 nt, synthetic construct
  source 1..20: mol_type = other RNA
cagagacagcgggattcctt

SEQ ID NO: 33140 - RNA, 20 nt, synthetic construct
  source 1..20: mol_type = other RNA
cagcagtgaagagaagctac

SEQ ID NO: 33141 - RNA, 20 nt, synthetic construct
  source 1..20: mol_type = other RNA
cagccagagacagcgggatt

SEQ ID NO: 33142 - RNA, 20 nt, synthetic construct
  source 1..20: mol_type = other RNA
cagcctcacaggtgtggcca

SEQ ID NO: 33143 - RNA, 20 nt, synthetic construct
  source 1..20: mol_type = other RNA
cagcgggattccttcccaca

SEQ ID NO: 33144 - RNA, 20 nt, synthetic construct
  source 1..20: mol_type = other RNA
cagcgtctcggtaagctccg

SEQ ID NO: 33145 - RNA, 20 nt, synthetic construct
  source 1..20: mol_type = other RNA
cagctcgctcccgcaccaaa

SEQ ID NO: 33146 - RNA, 20 nt, synthetic construct
  source 1..20: mol_type = other RNA
caggatgagaatcacaatca

SEQ ID NO: 33147 - RNA, 20 nt, synthetic construct
  source 1..20: mol_type = other RNA
caggtggttcgcagaagcag

SEQ ID NO: 33148 - RNA, 20 nt, synthetic construct
  source 1..20: mol_type = other RNA
caggtgtggccagctcgctc

SEQ ID NO: 33149 - RNA, 20 nt, synthetic construct
  source 1..20: mol_type = other RNA
cagtagcttctcttcactgc

SEQ ID NO: 33150 - RNA, 20 nt, synthetic construct
  source 1..20: mol_type = other RNA
cagtgaagagaagctactgt

SEQ ID NO: 33151 - RNA, 20 nt, synthetic construct
  source 1..20: mol_type = other RNA
cagtgattgtgattctcatc

SEQ ID NO: 33152 - RNA, 20 nt, synthetic construct
  source 1..20: mol_type = other RNA
catcctggtgtgggaaggaa

SEQ ID NO: 33153 - RNA, 20 nt, synthetic construct
  source 1..20: mol_type = other RNA
cattcaaggcacaccggcga

SEQ ID NO: 33154 - RNA, 20 nt, synthetic construct
  source 1..20: mol_type = other RNA
ccaaacacagtagcttctct

SEQ ID NO: 33155 - RNA, 20 nt, synthetic construct
  source 1..20: mol_type = other RNA
ccaatcgccggtgtgccttg

SEQ ID NO: 33156 - RNA, 20 nt, synthetic construct
  source 1..20: mol_type = other RNA
ccacaccaggatgagaatca

SEQ ID NO: 33157 - RNA, 20 nt, synthetic construct
  source 1..20: mol_type = other RNA
ccacacctgtgaggctgcag

SEQ ID NO: 33158 - RNA, 20 nt, synthetic construct
  source 1..20: mol_type = other RNA
ccacctgcgtggatcaccat

SEQ ID NO: 33159 - RNA, 20 nt, synthetic construct
  source 1..20: mol_type = other RNA
ccacgcaggtggttcgcaga

SEQ ID NO: 33160 - RNA, 20 nt, synthetic construct
  source 1..20: mol_type = other RNA
ccagagacagcgggattcct

SEQ ID NO: 33161 - RNA, 20 nt, synthetic construct
  source 1..20: mol_type = other RNA
ccagctcgctcccgcaccaa

SEQ ID NO: 33162 - RNA, 20 nt, synthetic construct
  source 1..20: mol_type = other RNA
ccaggatgagaatcacaatc

SEQ ID NO: 33163 - RNA, 20 nt, synthetic construct
  source 1..20: mol_type = other RNA
cccacaccaggatgagaatc

SEQ ID NO: 33164 - RNA, 20 nt, synthetic construct
  source 1..20: mol_type = other RNA
cccagggcctctcccctctt

SEQ ID NO: 33165 - RNA, 20 nt, synthetic construct
  source 1..20: mol_type = other RNA
cccgcaccaaacacagtagc

SEQ ID NO: 33166 - RNA, 20 nt, synthetic construct
  source 1..20: mol_type = other RNA
cccgctgtctctggctgaca

SEQ ID NO: 33167 - RNA, 20 nt, synthetic construct
  source 1..20: mol_type = other RNA
ccctgggcttcacttactct

SEQ ID NO: 33168 - RNA, 20 nt, synthetic construct
  source 1..20: mol_type = other RNA
ccgagacgctgaggaaatac

SEQ ID NO: 33169 - RNA, 20 nt, synthetic construct
  source 1..20: mol_type = other RNA
ccgagtagagtttgtcagcc

SEQ ID NO: 33170 - RNA, 20 nt, synthetic construct
  source 1..20: mol_type = other RNA
ccgcaaagaggggagaggcc

SEQ ID NO: 33171 - RNA, 20 nt, synthetic construct
  source 1..20: mol_type = other RNA
ccgcaccaaacacagtagct

SEQ ID NO: 33172 - RNA, 20 nt, synthetic construct
  source 1..20: mol_type = other RNA
ccgctgtctctggctgacaa

SEQ ID NO: 33173 - RNA, 20 nt, synthetic construct
  source 1..20: mol_type = other RNA
ccggcgattggtgagcgtgc

SEQ ID NO: 33174 - RNA, 20 nt, synthetic construct
  source 1..20: mol_type = other RNA
ccggtgtgccttgaatgaag

SEQ ID NO: 33175 - RNA, 20 nt, synthetic construct
  source 1..20: mol_type = other RNA
ccgtatttcctcagcgtctc

SEQ ID NO: 33176 - RNA, 20 nt, synthetic construct
  source 1..20: mol_type = other RNA
cctcacaggtgtggccagct

SEQ ID NO: 33177 - RNA, 20 nt, synthetic construct
  source 1..20: mol_type = other RNA
cctcagcgtctcggtaagct

SEQ ID NO: 33178 - RNA, 20 nt, synthetic construct
  source 1..20: mol_type = other RNA
cctgcgtggatcaccattcc

SEQ ID NO: 33179 - RNA, 20 nt, synthetic construct
  source 1..20: mol_type = other RNA
cctgggcttcacttactctt

SEQ ID NO: 33180 - RNA, 20 nt, synthetic construct
  source 1..20: mol_type = other RNA
cctggtgtgggaaggaatcc

SEQ ID NO: 33181 - RNA, 20 nt, synthetic construct
  source 1..20: mol_type = other RNA
cctgtgaggctgcagtgatt

SEQ ID NO: 33182 - RNA, 20 nt, synthetic construct
  source 1..20: mol_type = other RNA
ccttcccacaccaggatgag

SEQ ID NO: 33183 - RNA, 20 nt, synthetic construct
  source 1..20: mol_type = other RNA
ccttgaatgaagagtaagtg

SEQ ID NO: 33184 - RNA, 20 nt, synthetic construct
  source 1..20: mol_type = other RNA
cgaaccacctgcgtggatca

SEQ ID NO: 33185 - RNA, 20 nt, synthetic construct
  source 1..20: mol_type = other RNA
cgagacgctgaggaaatacg

SEQ ID NO: 33186 - RNA, 20 nt, synthetic construct
  source 1..20: mol_type = other RNA
cgagctggccacacctgtga

SEQ ID NO: 33187 - RNA, 20 nt, synthetic construct
  source 1..20: mol_type = other RNA
cgagtagagtttgtcagcca

SEQ ID NO: 33188 - RNA, 20 nt, synthetic construct
  source 1..20: mol_type = other RNA
cgattggtgagcgtgccgta

SEQ ID NO: 33189 - RNA, 20 nt, synthetic construct
  source 1..20: mol_type = other RNA
cgcaaagaggggagaggccc

SEQ ID NO: 33190 - RNA, 20 nt, synthetic construct
  source 1..20: mol_type = other RNA
cgcaccaaacacagtagctt

SEQ ID NO: 33191 - RNA, 20 nt, synthetic construct
  source 1..20: mol_type = other RNA
cgcagaagcagcagtgaaga

SEQ ID NO: 33192 - RNA, 20 nt, synthetic construct
  source 1..20: mol_type = other RNA
cgcaggtggttcgcagaagc

SEQ ID NO: 33193 - RNA, 20 nt, synthetic construct
  source 1..20: mol_type = other RNA
cgccggtgtgccttgaatga

SEQ ID NO: 33194 - RNA, 20 nt, synthetic construct
  source 1..20: mol_type = other RNA
cgctcaccaatcgccggtgt

SEQ ID NO: 33195 - RNA, 20 nt, synthetic construct
  source 1..20: mol_type = other RNA
cgctcccgcaccaaacacag

SEQ ID NO: 33196 - RNA, 20 nt, synthetic construct
  source 1..20: mol_type = other RNA
cgctgaggaaatacggcacg

SEQ ID NO: 33197 - RNA, 20 nt, synthetic construct
  source 1..20: mol_type = other RNA
cgctgtctctggctgacaaa

SEQ ID NO: 33198 - RNA, 20 nt, synthetic construct
  source 1..20: mol_type = other RNA
cggagcttaccgagacgctg

SEQ ID NO: 33199 - RNA, 20 nt, synthetic construct
  source 1..20: mol_type = other RNA
cggcacgctcaccaatcgcc

SEQ ID NO: 33200 - RNA, 20 nt, synthetic construct
  source 1..20: mol_type = other RNA
cggcgattggtgagcgtgcc

SEQ ID NO: 33201 - RNA, 20 nt, synthetic construct
  source 1..20: mol_type = other RNA
cgggagcgagctggccacac

SEQ ID NO: 33202 - RNA, 20 nt, synthetic construct
  source 1..20: mol_type = other RNA
cgggattccttcccacacca

SEQ ID NO: 33203 - RNA, 20 nt, synthetic construct
  source 1..20: mol_type = other RNA
cggtaagctccgagtagagt

SEQ ID NO: 33204 - RNA, 20 nt, synthetic construct
  source 1..20: mol_type = other RNA
cggtgtgccttgaatgaaga

SEQ ID NO: 33205 - RNA, 20 nt, synthetic construct
  source 1..20: mol_type = other RNA
cgtatttcctcagcgtctcg

SEQ ID NO: 33206 - RNA, 20 nt, synthetic construct
  source 1..20: mol_type = other RNA
cgtctcggtaagctccgagt

SEQ ID NO: 33207 - RNA, 20 nt, synthetic construct
  source 1..20: mol_type = other RNA
cgtgccgtatttcctcagcg

SEQ ID NO: 33208 - RNA, 20 nt, synthetic construct
  source 1..20: mol_type = other RNA
cgtggatcaccattccatcc

SEQ ID NO: 33209 - RNA, 20 nt, synthetic construct
  source 1..20: mol_type = other RNA
ctactcggagcttaccgaga

SEQ ID NO: 33210 - RNA, 20 nt, synthetic construct
  source 1..20: mol_type = other RNA
ctactgtgtttggtgcggga

SEQ ID NO: 33211 - RNA, 20 nt, synthetic construct
  source 1..20: mol_type = other RNA
ctcacaggtgtggccagctc

SEQ ID NO: 33212 - RNA, 20 nt, synthetic construct
  source 1..20: mol_type = other RNA
ctcaccaatcgccggtgtgc

SEQ ID NO: 33213 - RNA, 20 nt, synthetic construct
  source 1..20: mol_type = other RNA
ctcagcgtctcggtaagctc

SEQ ID NO: 33214 - RNA, 20 nt, synthetic construct
  source 1..20: mol_type = other RNA
ctcatcctggtgtgggaagg

SEQ ID NO: 33215 - RNA, 20 nt, synthetic construct
  source 1..20: mol_type = other RNA
ctcccgcaccaaacacagta

SEQ ID NO: 33216 - RNA, 20 nt, synthetic construct
  source 1..20: mol_type = other RNA
ctccgagtagagtttgtcag

SEQ ID NO: 33217 - RNA, 20 nt, synthetic construct
  source 1..20: mol_type = other RNA
ctcgctcccgcaccaaacac

SEQ ID NO: 33218 - RNA, 20 nt, synthetic construct
  source 1..20: mol_type = other RNA
ctcggagcttaccgagacgc

SEQ ID NO: 33219 - RNA, 20 nt, synthetic construct
  source 1..20: mol_type = other RNA
ctcggtaagctccgagtaga

SEQ ID NO: 33220 - RNA, 20 nt, synthetic construct
  source 1..20: mol_type = other RNA
ctctactcggagcttaccga

SEQ ID NO: 33221 - RNA, 20 nt, synthetic construct
  source 1..20: mol_type = other RNA
ctctggctgacaaactctac

SEQ ID NO: 33222 - RNA, 20 nt, synthetic construct
  source 1..20: mol_type = other RNA
ctcttcactgctgcttctgc

SEQ ID NO: 33223 - RNA, 20 nt, synthetic construct
  source 1..20: mol_type = other RNA
ctcttcattcaaggcacacc

SEQ ID NO: 33224 - RNA, 20 nt, synthetic construct
  source 1..20: mol_type = other RNA
ctgacaaactctactcggag

SEQ ID NO: 33225 - RNA, 20 nt, synthetic construct
  source 1..20: mol_type = other RNA
ctgaggaaatacggcacgct

SEQ ID NO: 33226 - RNA, 20 nt, synthetic construct
  source 1..20: mol_type = other RNA
ctgcagcctcacaggtgtgg

SEQ ID NO: 33227 - RNA, 20 nt, synthetic construct
  source 1..20: mol_type = other RNA
ctgcagtgattgtgattctc

SEQ ID NO: 33228 - RNA, 20 nt, synthetic construct
  source 1..20: mol_type = other RNA
ctgcgaaccacctgcgtgga

SEQ ID NO: 33229 - RNA, 20 nt, synthetic construct
  source 1..20: mol_type = other RNA
ctgcgtggatcaccattcca

SEQ ID NO: 33230 - RNA, 20 nt, synthetic construct
  source 1..20: mol_type = other RNA
ctgctgcttctgcgaaccac

SEQ ID NO: 33231 - RNA, 20 nt, synthetic construct
  source 1..20: mol_type = other RNA
ctgcttctgcgaaccacctg

SEQ ID NO: 33232 - RNA, 20 nt, synthetic construct
  source 1..20: mol_type = other RNA
ctggccacacctgtgaggct

SEQ ID NO: 33233 - RNA, 20 nt, synthetic construct
  source 1..20: mol_type = other RNA
ctggctgacaaactctactc

SEQ ID NO: 33234 - RNA, 20 nt, synthetic construct
  source 1..20: mol_type = other RNA
ctgggcttcacttactcttc

SEQ ID NO: 33235 - RNA, 20 nt, synthetic construct
  source 1..20: mol_type = other RNA
ctggtgtgggaaggaatccc

SEQ ID NO: 33236 - RNA, 20 nt, synthetic construct
  source 1..20: mol_type = other RNA
ctgtctctggctgacaaact

SEQ ID NO: 33237 - RNA, 20 nt, synthetic construct
  source 1..20: mol_type = other RNA
ctgtgaggctgcagtgattg

SEQ ID NO: 33238 - RNA, 20 nt, synthetic construct
  source 1..20: mol_type = other RNA
ctgtgtttggtgcgggagcg

SEQ ID NO: 33239 - RNA, 20 nt, synthetic construct
  source 1..20: mol_type = other RNA
cttaccgagacgctgaggaa

SEQ ID NO: 33240 - RNA, 20 nt, synthetic construct
  source 1..20: mol_type = other RNA
cttactcttcattcaaggca

SEQ ID NO: 33241 - RNA, 20 nt, synthetic construct
  source 1..20: mol_type = other RNA
cttcactgctgcttctgcga

SEQ ID NO: 33242 - RNA, 20 nt, synthetic construct
  source 1..20: mol_type = other RNA
cttcacttactcttcattca

SEQ ID NO: 33243 - RNA, 20 nt, synthetic construct
  source 1..20: mol_type = other RNA
cttcattcaaggcacaccgg

SEQ ID NO: 33244 - RNA, 20 nt, synthetic construct
  source 1..20: mol_type = other RNA
cttcccacaccaggatgaga

SEQ ID NO: 33245 - RNA, 20 nt, synthetic construct
  source 1..20: mol_type = other RNA
cttctcttcactgctgcttc

SEQ ID NO: 33246 - RNA, 20 nt, synthetic construct
  source 1..20: mol_type = other RNA
cttctgcgaaccacctgcgt

SEQ ID NO: 33247 - RNA, 20 nt, synthetic construct
  source 1..20: mol_type = other RNA
cttgaatgaagagtaagtga

SEQ ID NO: 33248 - RNA, 20 nt, synthetic construct
  source 1..20: mol_type = other RNA
gaaatacggcacgctcacca

SEQ ID NO: 33249 - RNA, 20 nt, synthetic construct
  source 1..20: mol_type = other RNA
gaaccacctgcgtggatcac

SEQ ID NO: 33250 - RNA, 20 nt, synthetic construct
  source 1..20: mol_type = other RNA
gaagagaagctactgtgttt

SEQ ID NO: 33251 - RNA, 20 nt, synthetic construct
  source 1..20: mol_type = other RNA
gaagagtaagtgaagcccag

SEQ ID NO: 33252 - RNA, 20 nt, synthetic construct
  source 1..20: mol_type = other RNA
gaagcagcagtgaagagaag

SEQ ID NO: 33253 - RNA, 20 nt, synthetic construct
  source 1..20: mol_type = other RNA
gaagcccagggcctctcccc

SEQ ID NO: 33254 - RNA, 20 nt, synthetic construct
  source 1..20: mol_type = other RNA
gaagctactgtgtttggtgc

SEQ ID NO: 33255 - RNA, 20 nt, synthetic construct
  source 1..20: mol_type = other RNA
gaaggaatcccgctgtctct

SEQ ID NO: 33256 - RNA, 20 nt, synthetic construct
  source 1..20: mol_type = other RNA
gaatcacaatcactgcagcc

SEQ ID NO: 33257 - RNA, 20 nt, synthetic construct
  source 1..20: mol_type = other RNA
gaatcccgctgtctctggct

SEQ ID NO: 33258 - RNA, 20 nt, synthetic construct
  source 1..20: mol_type = other RNA
gaatgaagagtaagtgaagc

SEQ ID NO: 33259 - RNA, 20 nt, synthetic construct
  source 1..20: mol_type = other RNA
gaatggtgatccacgcaggt

SEQ ID NO: 33260 - RNA, 20 nt, synthetic construct
  source 1..20: mol_type = other RNA
gacaaactctactcggagct

SEQ ID NO: 33261 - RNA, 20 nt, synthetic construct
  source 1..20: mol_type = other RNA
gacagcgggattccttccca

SEQ ID NO: 33262 - RNA, 20 nt, synthetic construct
  source 1..20: mol_type = other RNA
gacgctgaggaaatacggca

SEQ ID NO: 33263 - RNA, 20 nt, synthetic construct
  source 1..20: mol_type = other RNA
gagaagctactgtgtttggt

SEQ ID NO: 33264 - RNA, 20 nt, synthetic construct
  source 1..20: mol_type = other RNA
gagaatcacaatcactgcag

SEQ ID NO: 33265 - RNA, 20 nt, synthetic construct
  source 1..20: mol_type = other RNA
gagacagcgggattccttcc

SEQ ID NO: 33266 - RNA, 20 nt, synthetic construct
  source 1..20: mol_type = other RNA
gagacgctgaggaaatacgg

SEQ ID NO: 33267 - RNA, 20 nt, synthetic construct
  source 1..20: mol_type = other RNA
gagaggccctgggcttcact

SEQ ID NO: 33268 - RNA, 20 nt, synthetic construct
  source 1..20: mol_type = other RNA
gagcgagctggccacacctg

SEQ ID NO: 33269 - RNA, 20 nt, synthetic construct
  source 1..20: mol_type = other RNA
gagcgtgccgtatttcctca

SEQ ID NO: 33270 - RNA, 20 nt, synthetic construct
  source 1..20: mol_type = other RNA
gagctggccacacctgtgag

SEQ ID NO: 33271 - RNA, 20 nt, synthetic construct
  source 1..20: mol_type = other RNA
gagcttaccgagacgctgag

SEQ ID NO: 33272 - RNA, 20 nt, synthetic construct
  source 1..20: mol_type = other RNA
gaggaaatacggcacgctca

SEQ ID NO: 33273 - RNA, 20 nt, synthetic construct
  source 1..20: mol_type = other RNA
gaggccctgggcttcactta

SEQ ID NO: 33274 - RNA, 20 nt, synthetic construct
  source 1..20: mol_type = other RNA
gaggctgcagtgattgtgat

SEQ ID NO: 33275 - RNA, 20 nt, synthetic construct
  source 1..20: mol_type = other RNA
gaggggagaggccctgggct

SEQ ID NO: 33276 - RNA, 20 nt, synthetic construct
  source 1..20: mol_type = other RNA
gagtaagtgaagcccagggc

SEQ ID NO: 33277 - RNA, 20 nt, synthetic construct
  source 1..20: mol_type = other RNA
gagtagagtttgtcagccag

SEQ ID NO: 33278 - RNA, 20 nt, synthetic construct
  source 1..20: mol_type = other RNA
gagtttgtcagccagagaca

SEQ ID NO: 33279 - RNA, 20 nt, synthetic construct
  source 1..20: mol_type = other RNA
gatcaccattccatcccaaa

SEQ ID NO: 33280 - RNA, 20 nt, synthetic construct
  source 1..20: mol_type = other RNA
gatccacgcaggtggttcgc

SEQ ID NO: 33281 - RNA, 20 nt, synthetic construct
  source 1..20: mol_type = other RNA
gatgagaatcacaatcactg

SEQ ID NO: 33282 - RNA, 20 nt, synthetic construct
  source 1..20: mol_type = other RNA
gatggaatggtgatccacgc

SEQ ID NO: 33283 - RNA, 20 nt, synthetic construct
  source 1..20: mol_type = other RNA
gattccttcccacaccagga

SEQ ID NO: 33284 - RNA, 20 nt, synthetic construct
  source 1..20: mol_type = other RNA
gattctcatcctggtgtggg

SEQ ID NO: 33285 - RNA, 20 nt, synthetic construct
  source 1..20: mol_type = other RNA
gattggtgagcgtgccgtat

SEQ ID NO: 33286 - RNA, 20 nt, synthetic construct
  source 1..20: mol_type = other RNA
gattgtgattctcatcctgg

SEQ ID NO: 33287 - RNA, 20 nt, synthetic construct
  source 1..20: mol_type = other RNA
gcaaagaggggagaggccct

SEQ ID NO: 33288 - RNA, 20 nt, synthetic construct
  source 1..20: mol_type = other RNA
gcacaccggcgattggtgag

SEQ ID NO: 33289 - RNA, 20 nt, synthetic construct
  source 1..20: mol_type = other RNA
gcaccaaacacagtagcttc

SEQ ID NO: 33290 - RNA, 20 nt, synthetic construct
  source 1..20: mol_type = other RNA
gcacgctcaccaatcgccgg

SEQ ID NO: 33291 - RNA, 20 nt, synthetic construct
  source 1..20: mol_type = other RNA
gcagaagcagcagtgaagag

SEQ ID NO: 33292 - RNA, 20 nt, synthetic construct
  source 1..20: mol_type = other RNA
gcagcagtgaagagaagcta

SEQ ID NO: 33293 - RNA, 20 nt, synthetic construct
  source 1..20: mol_type = other RNA
gcagcctcacaggtgtggcc

SEQ ID NO: 33294 - RNA, 20 nt, synthetic construct
  source 1..20: mol_type = other RNA
gcaggtggttcgcagaagca

SEQ ID NO: 33295 - RNA, 20 nt, synthetic construct
  source 1..20: mol_type = other RNA
gcagtgaagagaagctactg

SEQ ID NO: 33296 - RNA, 20 nt, synthetic construct
  source 1..20: mol_type = other RNA
gcagtgattgtgattctcat

SEQ ID NO: 33297 - RNA, 20 nt, synthetic construct
  source 1..20: mol_type = other RNA
gccacacctgtgaggctgca

SEQ ID NO: 33298 - RNA, 20 nt, synthetic construct
  source 1..20: mol_type = other RNA
gccagagacagcgggattcc

SEQ ID NO: 33299 - RNA, 20 nt, synthetic construct
  source 1..20: mol_type = other RNA
gccagctcgctcccgcacca

SEQ ID NO: 33300 - RNA, 20 nt, synthetic construct
  source 1..20: mol_type = other RNA
gcccagggcctctcccctct

SEQ ID NO: 33301 - RNA, 20 nt, synthetic construct
  source 1..20: mol_type = other RNA
gccctgggcttcacttactc

SEQ ID NO: 33302 - RNA, 20 nt, synthetic construct
  source 1..20: mol_type = other RNA
gccgcaaagaggggagaggc

SEQ ID NO: 33303 - RNA, 20 nt, synthetic construct
  source 1..20: mol_type = other RNA
gccggtgtgccttgaatgaa

SEQ ID NO: 33304 - RNA, 20 nt, synthetic construct
  source 1..20: mol_type = other RNA
gccgtatttcctcagcgtct

SEQ ID NO: 33305 - RNA, 20 nt, synthetic construct
  source 1..20: mol_type = other RNA
gcctcacaggtgtggccagc

SEQ ID NO: 33306 - RNA, 20 nt, synthetic construct
  source 1..20: mol_type = other RNA
gccttgaatgaagagtaagt

SEQ ID NO: 33307 - RNA, 20 nt, synthetic construct
  source 1..20: mol_type = other RNA
gcgaaccacctgcgtggatc

SEQ ID NO: 33308 - RNA, 20 nt, synthetic construct
  source 1..20: mol_type = other RNA
gcgagctggccacacctgtg

SEQ ID NO: 33309 - RNA, 20 nt, synthetic construct
  source 1..20: mol_type = other RNA
gcgattggtgagcgtgccgt

SEQ ID NO: 33310 - RNA, 20 nt, synthetic construct
  source 1..20: mol_type = other RNA
gcgggagcgagctggccaca

SEQ ID NO: 33311 - RNA, 20 nt, synthetic construct
  source 1..20: mol_type = other RNA
gcgggattccttcccacacc

SEQ ID NO: 33312 - RNA, 20 nt, synthetic construct
  source 1..20: mol_type = other RNA
gcgtctcggtaagctccgag

SEQ ID NO: 33313 - RNA, 20 nt, synthetic construct
  source 1..20: mol_type = other RNA
gcgtgccgtatttcctcagc

SEQ ID NO: 33314 - RNA, 20 nt, synthetic construct
  source 1..20: mol_type = other RNA
gcgtggatcaccattccatc

SEQ ID NO: 33315 - RNA, 20 nt, synthetic construct
  source 1..20: mol_type = other RNA
gctactgtgtttggtgcggg

SEQ ID NO: 33316 - RNA, 20 nt, synthetic construct
  source 1..20: mol_type = other RNA
gctcaccaatcgccggtgtg

SEQ ID NO: 33317 - RNA, 20 nt, synthetic construct
  source 1..20: mol_type = other RNA
gctcccgcaccaaacacagt

SEQ ID NO: 33318 - RNA, 20 nt, synthetic construct
  source 1..20: mol_type = other RNA
gctccgagtagagtttgtca

SEQ ID NO: 33319 - RNA, 20 nt, synthetic construct
  source 1..20: mol_type = other RNA
gctcgctcccgcaccaaaca

SEQ ID NO: 33320 - RNA, 20 nt, synthetic construct
  source 1..20: mol_type = other RNA
gctgacaaactctactcgga

SEQ ID NO: 33321 - RNA, 20 nt, synthetic construct
  source 1..20: mol_type = other RNA
gctgaggaaatacggcacgc

SEQ ID NO: 33322 - RNA, 20 nt, synthetic construct
  source 1..20: mol_type = other RNA
gctgcagtgattgtgattct

SEQ ID NO: 33323 - RNA, 20 nt, synthetic construct
  source 1..20: mol_type = other RNA
gctgcttctgcgaaccacct

SEQ ID NO: 33324 - RNA, 20 nt, synthetic construct
  source 1..20: mol_type = other RNA
gctggccacacctgtgaggc

SEQ ID NO: 33325 - RNA, 20 nt, synthetic construct
  source 1..20: mol_type = other RNA
gctgtctctggctgacaaac

SEQ ID NO: 33326 - RNA, 20 nt, synthetic construct
  source 1..20: mol_type = other RNA
gcttaccgagacgctgagga

SEQ ID NO: 33327 - RNA, 20 nt, synthetic construct
  source 1..20: mol_type = other RNA
gcttcacttactcttcattc

SEQ ID NO: 33328 - RNA, 20 nt, synthetic construct
  source 1..20: mol_type = other RNA
gcttctcttcactgctgctt

SEQ ID NO: 33329 - RNA, 20 nt, synthetic construct
  source 1..20: mol_type = other RNA
gcttctgcgaaccacctgcg

SEQ ID NO: 33330 - RNA, 20 nt, synthetic construct
  source 1..20: mol_type = other RNA
ggaaatacggcacgctcacc

SEQ ID NO: 33331 - RNA, 20 nt, synthetic construct
  source 1..20: mol_type = other RNA
ggaaggaatcccgctgtctc

SEQ ID NO: 33332 - RNA, 20 nt, synthetic construct
  source 1..20: mol_type = other RNA
ggaatcccgctgtctctggc

SEQ ID NO: 33333 - RNA, 20 nt, synthetic construct
  source 1..20: mol_type = other RNA
ggaatggtgatccacgcagg

SEQ ID NO: 33334 - RNA, 20 nt, synthetic construct
  source 1..20: mol_type = other RNA
ggagaggccctgggcttcac

SEQ ID NO: 33335 - RNA, 20 nt, synthetic construct
  source 1..20: mol_type = other RNA
ggagcgagctggccacacct

SEQ ID NO: 33336 - RNA, 20 nt, synthetic construct
  source 1..20: mol_type = other RNA
ggagcttaccgagacgctga

SEQ ID NO: 33337 - RNA, 20 nt, synthetic construct
  source 1..20: mol_type = other RNA
ggatcaccattccatcccaa

SEQ ID NO: 33338 - RNA, 20 nt, synthetic construct
  source 1..20: mol_type = other RNA
ggatgagaatcacaatcact

SEQ ID NO: 33339 - RNA, 20 nt, synthetic construct
  source 1..20: mol_type = other RNA
ggatggaatggtgatccacg

SEQ ID NO: 33340 - RNA, 20 nt, synthetic construct
  source 1..20: mol_type = other RNA
ggattccttcccacaccagg

SEQ ID NO: 33341 - RNA, 20 nt, synthetic construct
  source 1..20: mol_type = other RNA
ggcacaccggcgattggtga

SEQ ID NO: 33342 - RNA, 20 nt, synthetic construct
  source 1..20: mol_type = other RNA
ggcacgctcaccaatcgccg

SEQ ID NO: 33343 - RNA, 20 nt, synthetic construct
  source 1..20: mol_type = other RNA
ggccacacctgtgaggctgc

SEQ ID NO: 33344 - RNA, 20 nt, synthetic construct
  source 1..20: mol_type = other RNA
ggccagctcgctcccgcacc

SEQ ID NO: 33345 - RNA, 20 nt, synthetic construct
  source 1..20: mol_type = other RNA
ggccctgggcttcacttact

SEQ ID NO: 33346 - RNA, 20 nt, synthetic construct
  source 1..20: mol_type = other RNA
ggccgcaaagaggggagagg

SEQ ID NO: 33347 - RNA, 20 nt, synthetic construct
  source 1..20: mol_type = other RNA
ggcgattggtgagcgtgccg

SEQ ID NO: 33348 - RNA, 20 nt, synthetic construct
  source 1..20: mol_type = other RNA
ggctgacaaactctactcgg

SEQ ID NO: 33349 - RNA, 20 nt, synthetic construct
  source 1..20: mol_type = other RNA
ggctgcagtgattgtgattc

SEQ ID NO: 33350 - RNA, 20 nt, synthetic construct
  source 1..20: mol_type = other RNA
ggcttcacttactcttcatt

SEQ ID NO: 33351 - RNA, 20 nt, synthetic construct
  source 1..20: mol_type = other RNA
gggaaggaatcccgctgtct

SEQ ID NO: 33352 - RNA, 20 nt, synthetic construct
  source 1..20: mol_type = other RNA
gggagaggccctgggcttca

SEQ ID NO: 33353 - RNA, 20 nt, synthetic construct
  source 1..20: mol_type = other RNA
gggagcgagctggccacacc

SEQ ID NO: 33354 - RNA, 20 nt, synthetic construct
  source 1..20: mol_type = other RNA
gggatggaatggtgatccac

SEQ ID NO: 33355 - RNA, 20 nt, synthetic construct
  source 1..20: mol_type = other RNA
gggattccttcccacaccag

SEQ ID NO: 33356 - RNA, 20 nt, synthetic construct
  source 1..20: mol_type = other RNA
gggcttcacttactcttcat

SEQ ID NO: 33357 - RNA, 20 nt, synthetic construct
  source 1..20: mol_type = other RNA
ggggagaggccctgggcttc

SEQ ID NO: 33358 - RNA, 20 nt, synthetic construct
  source 1..20: mol_type = other RNA
ggggggtgtttgggatggaa

SEQ ID NO: 33359 - RNA, 20 nt, synthetic construct
  source 1..20: mol_type = other RNA
gggggtgtttgggatggaat

SEQ ID NO: 33360 - RNA, 20 nt, synthetic construct
  source 1..20: mol_type = other RNA
ggggtgtttgggatggaatg

SEQ ID NO: 33361 - RNA, 20 nt, synthetic construct
  source 1..20: mol_type = other RNA
gggtggggggtgtttgggat

SEQ ID NO: 33362 - RNA, 20 nt, synthetic construct
  source 1..20: mol_type = other RNA
gggtgtttgggatggaatgg

SEQ ID NO: 33363 - RNA, 20 nt, synthetic construct
  source 1..20: mol_type = other RNA
ggtaagctccgagtagagtt

SEQ ID NO: 33364 - RNA, 20 nt, synthetic construct
  source 1..20: mol_type = other RNA
ggtgagcgtgccgtatttcc

SEQ ID NO: 33365 - RNA, 20 nt, synthetic construct
  source 1..20: mol_type = other RNA
ggtgatccacgcaggtggtt

SEQ ID NO: 33366 - RNA, 20 nt, synthetic construct
  source 1..20: mol_type = other RNA
ggtgcgggagcgagctggcc

SEQ ID NO: 33367 - RNA, 20 nt, synthetic construct
  source 1..20: mol_type = other RNA
ggtggggggtgtttgggatg

SEQ ID NO: 33368 - RNA, 20 nt, synthetic construct
  source 1..20: mol_type = other RNA
ggtggttcgcagaagcagca

SEQ ID NO: 33369 - RNA, 20 nt, synthetic construct
  source 1..20: mol_type = other RNA
ggtgtgccttgaatgaagag

SEQ ID NO: 33370 - RNA, 20 nt, synthetic construct
  source 1..20: mol_type = other RNA
ggtgtggccagctcgctccc

SEQ ID NO: 33371 - RNA, 20 nt, synthetic construct
  source 1..20: mol_type = other RNA
ggtgtgggaaggaatcccgc

SEQ ID NO: 33372 - RNA, 20 nt, synthetic construct
  source 1..20: mol_type = other RNA
ggtgtttgggatggaatggt

SEQ ID NO: 33373 - RNA, 20 nt, synthetic construct
  source 1..20: mol_type = other RNA
ggttcgcagaagcagcagtg

SEQ ID NO: 33374 - RNA, 20 nt, synthetic construct
  source 1..20: mol_type = other RNA
gtaagctccgagtagagttt

SEQ ID NO: 33375 - RNA, 20 nt, synthetic construct
  source 1..20: mol_type = other RNA
gtaagtgaagcccagggcct

SEQ ID NO: 33376 - RNA, 20 nt, synthetic construct
  source 1..20: mol_type = other RNA
gtagagtttgtcagccagag

SEQ ID NO: 33377 - RNA, 20 nt, synthetic construct
  source 1..20: mol_type = other RNA
gtagcttctcttcactgctg

SEQ ID NO: 33378 - RNA, 20 nt, synthetic construct
  source 1..20: mol_type = other RNA
gtatttcctcagcgtctcgg

SEQ ID NO: 33379 - RNA, 20 nt, synthetic construct
  source 1..20: mol_type = other RNA
gtcagccagagacagcggga

SEQ ID NO: 33380 - RNA, 20 nt, synthetic construct
  source 1..20: mol_type = other RNA
gtctcggtaagctccgagta

SEQ ID NO: 33381 - RNA, 20 nt, synthetic construct
  source 1..20: mol_type = other RNA
gtctctggctgacaaactct

SEQ ID NO: 33382 - RNA, 20 nt, synthetic construct
  source 1..20: mol_type = other RNA
gtgaagagaagctactgtgt

SEQ ID NO: 33383 - RNA, 20 nt, synthetic construct
  source 1..20: mol_type = other RNA
gtgaagcccagggcctctcc

SEQ ID NO: 33384 - RNA, 20 nt, synthetic construct
  source 1..20: mol_type = other RNA
gtgagcgtgccgtatttcct

SEQ ID NO: 33385 - RNA, 20 nt, synthetic construct
  source 1..20: mol_type = other RNA
gtgaggctgcagtgattgtg

SEQ ID NO: 33386 - RNA, 20 nt, synthetic construct
  source 1..20: mol_type = other RNA
gtgatccacgcaggtggttc

SEQ ID NO: 33387 - RNA, 20 nt, synthetic construct
  source 1..20: mol_type = other RNA
gtgattctcatcctggtgtg

SEQ ID NO: 33388 - RNA, 20 nt, synthetic construct
  source 1..20: mol_type = other RNA
gtgattgtgattctcatcct

SEQ ID NO: 33389 - RNA, 20 nt, synthetic construct
  source 1..20: mol_type = other RNA
gtgccgtatttcctcagcgt

SEQ ID NO: 33390 - RNA, 20 nt, synthetic construct
  source 1..20: mol_type = other RNA
gtgccttgaatgaagagtaa

SEQ ID NO: 33391 - RNA, 20 nt, synthetic construct
  source 1..20: mol_type = other RNA
gtgcgggagcgagctggcca

SEQ ID NO: 33392 - RNA, 20 nt, synthetic construct
  source 1..20: mol_type = other RNA
gtggatcaccattccatccc

SEQ ID NO: 33393 - RNA, 20 nt, synthetic construct
  source 1..20: mol_type = other RNA
gtggccagctcgctcccgca

SEQ ID NO: 33394 - RNA, 20 nt, synthetic construct
  source 1..20: mol_type = other RNA
gtgggaaggaatcccgctgt

SEQ ID NO: 33395 - RNA, 20 nt, synthetic construct
  source 1..20: mol_type = other RNA
gtggggggtgtttgggatgg

SEQ ID NO: 33396 - RNA, 20 nt, synthetic construct
  source 1..20: mol_type = other RNA
gtggttcgcagaagcagcag

SEQ ID NO: 33397 - RNA, 20 nt, synthetic construct
  source 1..20: mol_type = other RNA
gtgtgccttgaatgaagagt

SEQ ID NO: 33398 - RNA, 20 nt, synthetic construct
  source 1..20: mol_type = other RNA
gtgtggccagctcgctcccg

SEQ ID NO: 33399 - RNA, 20 nt, synthetic construct
  source 1..20: mol_type = other RNA
gtgtgggaaggaatcccgct

SEQ ID NO: 33400 - RNA, 20 nt, synthetic construct
  source 1..20: mol_type = other RNA
gtgtttgggatggaatggtg

SEQ ID NO: 33401 - RNA, 20 nt, synthetic construct
  source 1..20: mol_type = other RNA
gtgtttggtgcgggagcgag

SEQ ID NO: 33402 - RNA, 20 nt, synthetic construct
  source 1..20: mol_type = other RNA
gttcgcagaagcagcagtga

SEQ ID NO: 33403 - RNA, 20 nt, synthetic construct
  source 1..20: mol_type = other RNA
gtttgggatggaatggtgat

SEQ ID NO: 33404 - RNA, 20 nt, synthetic construct
  source 1..20: mol_type = other RNA
gtttggtgcgggagcgagct

SEQ ID NO: 33405 - RNA, 20 nt, synthetic construct
  source 1..20: mol_type = other RNA
gtttgtcagccagagacagc

SEQ ID NO: 33406 - RNA, 20 nt, synthetic construct
  source 1..20: mol_type = other RNA
taagctccgagtagagtttg

SEQ ID NO: 33407 - RNA, 20 nt, synthetic construct
  source 1..20: mol_type = other RNA
taagtgaagcccagggcctc

SEQ ID NO: 33408 - RNA, 20 nt, synthetic construct
  source 1..20: mol_type = other RNA
taccgagacgctgaggaaat

SEQ ID NO: 33409 - RNA, 20 nt, synthetic construct
  source 1..20: mol_type = other RNA
tacggcacgctcaccaatcg

SEQ ID NO: 33410 - RNA, 20 nt, synthetic construct
  source 1..20: mol_type = other RNA
tactcggagcttaccgagac

SEQ ID NO: 33411 - RNA, 20 nt, synthetic construct
  source 1..20: mol_type = other RNA
tactcttcattcaaggcaca

SEQ ID NO: 33412 - RNA, 20 nt, synthetic construct
  source 1..20: mol_type = other RNA
tactgtgtttggtgcgggag

SEQ ID NO: 33413 - RNA, 20 nt, synthetic construct
  source 1..20: mol_type = other RNA
tagagtttgtcagccagaga

SEQ ID NO: 33414 - RNA, 20 nt, synthetic construct
  source 1..20: mol_type = other RNA
tagcttctcttcactgctgc

SEQ ID NO: 33415 - RNA, 20 nt, synthetic construct
  source 1..20: mol_type = other RNA
tatttcctcagcgtctcggt

SEQ ID NO: 33416 - RNA, 20 nt, synthetic construct
  source 1..20: mol_type = other RNA
tcaaggcacaccggcgattg

SEQ ID NO: 33417 - RNA, 20 nt, synthetic construct
  source 1..20: mol_type = other RNA
tcacaatcactgcagcctca

SEQ ID NO: 33418 - RNA, 20 nt, synthetic construct
  source 1..20: mol_type = other RNA
tcacaggtgtggccagctcg

SEQ ID NO: 33419 - RNA, 20 nt, synthetic construct
  source 1..20: mol_type = other RNA
tcaccaatcgccggtgtgcc

SEQ ID NO: 33420 - RNA, 20 nt, synthetic construct
  source 1..20: mol_type = other RNA
tcaccattccatcccaaaca

SEQ ID NO: 33421 - RNA, 20 nt, synthetic construct
  source 1..20: mol_type = other RNA
tcactgcagcctcacaggtg

SEQ ID NO: 33422 - RNA, 20 nt, synthetic construct
  source 1..20: mol_type = other RNA
tcactgctgcttctgcgaac

SEQ ID NO: 33423 - RNA, 20 nt, synthetic construct
  source 1..20: mol_type = other RNA
tcacttactcttcattcaag

SEQ ID NO: 33424 - RNA, 20 nt, synthetic construct
  source 1..20: mol_type = other RNA
tcagccagagacagcgggat

SEQ ID NO: 33425 - RNA, 20 nt, synthetic construct
  source 1..20: mol_type = other RNA
tcagcgtctcggtaagctcc

SEQ ID NO: 33426 - RNA, 20 nt, synthetic construct
  source 1..20: mol_type = other RNA
tcatcctggtgtgggaagga

SEQ ID NO: 33427 - RNA, 20 nt, synthetic construct
  source 1..20: mol_type = other RNA
tcattcaaggcacaccggcg

SEQ ID NO: 33428 - RNA, 20 nt, synthetic construct
  source 1..20: mol_type = other RNA
tccacgcaggtggttcgcag

SEQ ID NO: 33429 - RNA, 20 nt, synthetic construct
  source 1..20: mol_type = other RNA
tcccacaccaggatgagaat

SEQ ID NO: 33430 - RNA, 20 nt, synthetic construct
  source 1..20: mol_type = other RNA
tcccgcaccaaacacagtag

SEQ ID NO: 33431 - RNA, 20 nt, synthetic construct
  source 1..20: mol_type = other RNA
tcccgctgtctctggctgac

SEQ ID NO: 33432 - RNA, 20 nt, synthetic construct
  source 1..20: mol_type = other RNA
tccgagtagagtttgtcagc

SEQ ID NO: 33433 - RNA, 20 nt, synthetic construct
  source 1..20: mol_type = other RNA
tcctcagcgtctcggtaagc

SEQ ID NO: 33434 - RNA, 20 nt, synthetic construct
  source 1..20: mol_type = other RNA
tcctggtgtgggaaggaatc

SEQ ID NO: 33435 - RNA, 20 nt, synthetic construct
  source 1..20: mol_type = other RNA
tccttcccacaccaggatga

SEQ ID NO: 33436 - RNA, 20 nt, synthetic construct
  source 1..20: mol_type = other RNA
tcgcagaagcagcagtgaag

SEQ ID NO: 33437 - RNA, 20 nt, synthetic construct
  source 1..20: mol_type = other RNA
tcgccggtgtgccttgaatg

SEQ ID NO: 33438 - RNA, 20 nt, synthetic construct
  source 1..20: mol_type = other RNA
tcgctcccgcaccaaacaca

SEQ ID NO: 33439 - RNA, 20 nt, synthetic construct
  source 1..20: mol_type = other RNA
tcggagcttaccgagacgct

SEQ ID NO: 33440 - RNA, 20 nt, synthetic construct
  source 1..20: mol_type = other RNA
tcggtaagctccgagtagag

SEQ ID NO: 33441 - RNA, 20 nt, synthetic construct
  source 1..20: mol_type = other RNA
tctactcggagcttaccgag

SEQ ID NO: 33442 - RNA, 20 nt, synthetic construct
  source 1..20: mol_type = other RNA
tctcatcctggtgtgggaag

SEQ ID NO: 33443 - RNA, 20 nt, synthetic construct
  source 1..20: mol_type = other RNA
tctcggtaagctccgagtag

SEQ ID NO: 33444 - RNA, 20 nt, synthetic construct
  source 1..20: mol_type = other RNA
tctctggctgacaaactcta

SEQ ID NO: 33445 - RNA, 20 nt, synthetic construct
  source 1..20: mol_type = other RNA
tctcttcactgctgcttctg

SEQ ID NO: 33446 - RNA, 20 nt, synthetic construct
  source 1..20: mol_type = other RNA
tctgcgaaccacctgcgtgg

SEQ ID NO: 33447 - RNA, 20 nt, synthetic construct
  source 1..20: mol_type = other RNA
tctggctgacaaactctact

SEQ ID NO: 33448 - RNA, 20 nt, synthetic construct
  source 1..20: mol_type = other RNA
tcttcactgctgcttctgcg

SEQ ID NO: 33449 - RNA, 20 nt, synthetic construct
  source 1..20: mol_type = other RNA
tcttcattcaaggcacaccg

SEQ ID NO: 33450 - RNA, 20 nt, synthetic construct
  source 1..20: mol_type = other RNA
tgaagagaagctactgtgtt

SEQ ID NO: 33451 - RNA, 20 nt, synthetic construct
  source 1..20: mol_type = other RNA
tgaagagtaagtgaagccca

SEQ ID NO: 33452 - RNA, 20 nt, synthetic construct
  source 1..20: mol_type = other RNA
tgaagcccagggcctctccc

SEQ ID NO: 33453 - RNA, 20 nt, synthetic construct
  source 1..20: mol_type = other RNA
tgaatgaagagtaagtgaag

SEQ ID NO: 33454 - RNA, 20 nt, synthetic construct
  source 1..20: mol_type = other RNA
tgacaaactctactcggagc

SEQ ID NO: 33455 - RNA, 20 nt, synthetic construct
  source 1..20: mol_type = other RNA
tgagaatcacaatcactgca

SEQ ID NO: 33456 - RNA, 20 nt, synthetic construct
  source 1..20: mol_type = other RNA
tgagcgtgccgtatttcctc

SEQ ID NO: 33457 - RNA, 20 nt, synthetic construct
  source 1..20: mol_type = other RNA
tgaggaaatacggcacgctc

SEQ ID NO: 33458 - RNA, 20 nt, synthetic construct
  source 1..20: mol_type = other RNA
tgaggctgcagtgattgtga

SEQ ID NO: 33459 - RNA, 20 nt, synthetic construct
  source 1..20: mol_type = other RNA
tgatccacgcaggtggttcg

SEQ ID NO: 33460 - RNA, 20 nt, synthetic construct
  source 1..20: mol_type = other RNA
tgattctcatcctggtgtgg

SEQ ID NO: 33461 - RNA, 20 nt, synthetic construct
  source 1..20: mol_type = other RNA
tgattgtgattctcatcctg

SEQ ID NO: 33462 - RNA, 20 nt, synthetic construct
  source 1..20: mol_type = other RNA
tgcagcctcacaggtgtggc

SEQ ID NO: 33463 - RNA, 20 nt, synthetic construct
  source 1..20: mol_type = other RNA
tgcagtgattgtgattctca

SEQ ID NO: 33464 - RNA, 20 nt, synthetic construct
  source 1..20: mol_type = other RNA
tgccgtatttcctcagcgtc

SEQ ID NO: 33465 - RNA, 20 nt, synthetic construct
  source 1..20: mol_type = other RNA
tgccttgaatgaagagtaag

SEQ ID NO: 33466 - RNA, 20 nt, synthetic construct
  source 1..20: mol_type = other RNA
tgcgaaccacctgcgtggat

SEQ ID NO: 33467 - RNA, 20 nt, synthetic construct
  source 1..20: mol_type = other RNA
tgcgggagcgagctggccac

SEQ ID NO: 33468 - RNA, 20 nt, synthetic construct
  source 1..20: mol_type = other RNA
tgcgtggatcaccattccat

SEQ ID NO: 33469 - RNA, 20 nt, synthetic construct
  source 1..20: mol_type = other RNA
tgctgcttctgcgaaccacc

SEQ ID NO: 33470 - RNA, 20 nt, synthetic construct
  source 1..20: mol_type = other RNA
tgcttctgcgaaccacctgc

SEQ ID NO: 33471 - RNA, 20 nt, synthetic construct
  source 1..20: mol_type = other RNA
tggaatggtgatccacgcag

SEQ ID NO: 33472 - RNA, 20 nt, synthetic construct
  source 1..20: mol_type = other RNA
tggatcaccattccatccca

SEQ ID NO: 33473 - RNA, 20 nt, synthetic construct
  source 1..20: mol_type = other RNA
tggccacacctgtgaggctg

SEQ ID NO: 33474 - RNA, 20 nt, synthetic construct
  source 1..20: mol_type = other RNA
tggccagctcgctcccgcac

SEQ ID NO: 33475 - RNA, 20 nt, synthetic construct
  source 1..20: mol_type = other RNA
tggccgcaaagaggggagag

SEQ ID NO: 33476 - RNA, 20 nt, synthetic construct
  source 1..20: mol_type = other RNA
tggctgacaaactctactcg

SEQ ID NO: 33477 - RNA, 20 nt, synthetic construct
  source 1..20: mol_type = other RNA
tgggaaggaatcccgctgtc

SEQ ID NO: 33478 - RNA, 20 nt, synthetic construct
  source 1..20: mol_type = other RNA
tgggatggaatggtgatcca

SEQ ID NO: 33479 - RNA, 20 nt, synthetic construct
  source 1..20: mol_type = other RNA
tgggcttcacttactcttca

SEQ ID NO: 33480 - RNA, 20 nt, synthetic construct
  source 1..20: mol_type = other RNA
tggggggtgtttgggatgga

SEQ ID NO: 33481 - RNA, 20 nt, synthetic construct
  source 1..20: mol_type = other RNA
tggtgagcgtgccgtatttc

SEQ ID NO: 33482 - RNA, 20 nt, synthetic construct
  source 1..20: mol_type = other RNA
tggtgatccacgcaggtggt

SEQ ID NO: 33483 - RNA, 20 nt, synthetic construct
  source 1..20: mol_type = other RNA
tggtgcgggagcgagctggc

SEQ ID NO: 33484 - RNA, 20 nt, synthetic construct
  source 1..20: mol_type = other RNA
tggtgtgggaaggaatcccg

SEQ ID NO: 33485 - RNA, 20 nt, synthetic construct
  source 1..20: mol_type = other RNA
tggttcgcagaagcagcagt

SEQ ID NO: 33486 - RNA, 20 nt, synthetic construct
  source 1..20: mol_type = other RNA
tgtcagccagagacagcggg

SEQ ID NO: 33487 - RNA, 20 nt, synthetic construct
  source 1..20: mol_type = other RNA
tgtctctggctgacaaactc

SEQ ID NO: 33488 - RNA, 20 nt, synthetic construct
  source 1..20: mol_type = other RNA
tgtgaggctgcagtgattgt

SEQ ID NO: 33489 - RNA, 20 nt, synthetic construct
  source 1..20: mol_type = other RNA
tgtgattctcatcctggtgt

SEQ ID NO: 33490 - RNA, 20 nt, synthetic construct
  source 1..20: mol_type = other RNA
tgtgccttgaatgaagagta

SEQ ID NO: 33491 - RNA, 20 nt, synthetic construct
  source 1..20: mol_type = other RNA
tgtggccagctcgctcccgc

SEQ ID NO: 33492 - RNA, 20 nt, synthetic construct
  source 1..20: mol_type = other RNA
tgtgggaaggaatcccgctg

SEQ ID NO: 33493 - RNA, 20 nt, synthetic construct
  source 1..20: mol_type = other RNA
tgtgtttggtgcgggagcga

SEQ ID NO: 33494 - RNA, 20 nt, synthetic construct
  source 1..20: mol_type = other RNA
tgtttgggatggaatggtga

SEQ ID NO: 33495 - RNA, 20 nt, synthetic construct
  source 1..20: mol_type = other RNA
tgtttggtgcgggagcgagc

SEQ ID NO: 33496 - RNA, 20 nt, synthetic construct
  source 1..20: mol_type = other RNA
ttaccgagacgctgaggaaa

SEQ ID NO: 33497 - RNA, 20 nt, synthetic construct
  source 1..20: mol_type = other RNA
ttactcttcattcaaggcac

SEQ ID NO: 33498 - RNA, 20 nt, synthetic construct
  source 1..20: mol_type = other RNA
ttcaaggcacaccggcgatt

SEQ ID NO: 33499 - RNA, 20 nt, synthetic construct
  source 1..20: mol_type = other RNA
ttcactgctgcttctgcgaa

SEQ ID NO: 33500 - RNA, 20 nt, synthetic construct
  source 1..20: mol_type = other RNA
ttcacttactcttcattcaa

SEQ ID NO: 33501 - RNA, 20 nt, synthetic construct
  source 1..20: mol_type = other RNA
ttcattcaaggcacaccggc

SEQ ID NO: 33502 - RNA, 20 nt, synthetic construct
  source 1..20: mol_type = other RNA
ttcccacaccaggatgagaa

SEQ ID NO: 33503 - RNA, 20 nt, synthetic construct
  source 1..20: mol_type = other RNA
ttcctcagcgtctcggtaag

SEQ ID NO: 33504 - RNA, 20 nt, synthetic construct
  source 1..20: mol_type = other RNA
ttccttcccacaccaggatg

SEQ ID NO: 33505 - RNA, 20 nt, synthetic construct
  source 1..20: mol_type = other RNA
ttcgcagaagcagcagtgaa

SEQ ID NO: 33506 - RNA, 20 nt, synthetic construct
  source 1..20: mol_type = other RNA
ttctcatcctggtgtgggaa

SEQ ID NO: 33507 - RNA, 20 nt, synthetic construct
  source 1..20: mol_type = other RNA
ttctcttcactgctgcttct

SEQ ID NO: 33508 - RNA, 20 nt, synthetic construct
  source 1..20: mol_type = other RNA
ttctgcgaaccacctgcgtg

SEQ ID NO: 33509 - RNA, 20 nt, synthetic construct
  source 1..20: mol_type = other RNA
ttgaatgaagagtaagtgaa

SEQ ID NO: 33510 - RNA, 20 nt, synthetic construct
  source 1..20: mol_type = other RNA
ttgggatggaatggtgatcc

SEQ ID NO: 33511 - RNA, 20 nt, synthetic construct
  source 1..20: mol_type = other RNA
ttggtgagcgtgccgtattt

SEQ ID NO: 33512 - RNA, 20 nt, synthetic construct
  source 1..20: mol_type = other RNA
ttggtgcgggagcgagctgg

SEQ ID NO: 33513 - RNA, 20 nt, synthetic construct
  source 1..20: mol_type = other RNA
ttgtcagccagagacagcgg

SEQ ID NO: 33514 - RNA, 20 nt, synthetic construct
  source 1..20: mol_type = other RNA
ttgtgattctcatcctggtg

SEQ ID NO: 33515 - RNA, 20 nt, synthetic construct
  source 1..20: mol_type = other RNA
tttcctcagcgtctcggtaa

SEQ ID NO: 33516 - RNA, 20 nt, synthetic construct
  source 1..20: mol_type = other RNA
tttgggatggaatggtgatc

SEQ ID NO: 33517 - RNA, 20 nt, synthetic construct
  source 1..20: mol_type = other RNA
tttggtgcgggagcgagctg

SEQ ID NO: 33518 - RNA, 20 nt, synthetic construct
  source 1..20: mol_type = other RNA
tttgtcagccagagacagcg

SEQ ID NO: 33519 - RNA, 21 nt, synthetic construct
  source 1..21: mol_type = other RNA
aaacacagtagcttctcttca

SEQ ID NO: 33520 - RNA, 21 nt, synthetic construct
  source 1..21: mol_type = other RNA
aaactctactcggagcttacc

SEQ ID NO: 33521 - RNA, 21 nt, synthetic construct
  source 1..21: mol_type = other RNA
aaagaggggagaggccctggg

SEQ ID NO: 33522 - RNA, 21 nt, synthetic construct
  source 1..21: mol_type = other RNA
aaatacggcacgctcaccaat

SEQ ID NO: 33523 - RNA, 21 nt, synthetic construct
  source 1..21: mol_type = other RNA
aacacagtagcttctcttcac

SEQ ID NO: 33524 - RNA, 21 nt, synthetic construct
  source 1..21: mol_type = other RNA
aaccacctgcgtggatcacca

SEQ ID NO: 33525 - RNA, 21 nt, synthetic construct
  source 1..21: mol_type = other RNA
aactctactcggagcttaccg

SEQ ID NO: 33526 - RNA, 21 nt, synthetic construct
  source 1..21: mol_type = other RNA
aagagaagctactgtgtttgg

SEQ ID NO: 33527 - RNA, 21 nt, synthetic construct
  source 1..21: mol_type = other RNA
aagaggggagaggccctgggc

SEQ ID NO: 33528 - RNA, 21 nt, synthetic construct
  source 1..21: mol_type = other RNA
aagagtaagtgaagcccaggg

SEQ ID NO: 33529 - RNA, 21 nt, synthetic construct
  source 1..21: mol_type = other RNA
aagcagcagtgaagagaagct

SEQ ID NO: 33530 - RNA, 21 nt, synthetic construct
  source 1..21: mol_type = other RNA
aagcccagggcctctcccctc

SEQ ID NO: 33531 - RNA, 21 nt, synthetic construct
  source 1..21: mol_type = other RNA
aagctactgtgtttggtgcgg

SEQ ID NO: 33532 - RNA, 21 nt, synthetic construct
  source 1..21: mol_type = other RNA
aagctccgagtagagtttgtc

SEQ ID NO: 33533 - RNA, 21 nt, synthetic construct
  source 1..21: mol_type = other RNA
aaggaatcccgctgtctctgg

SEQ ID NO: 33534 - RNA, 21 nt, synthetic construct
  source 1..21: mol_type = other RNA
aaggcacaccggcgattggtg

SEQ ID NO: 33535 - RNA, 21 nt, synthetic construct
  source 1..21: mol_type = other RNA
aagtgaagcccagggcctctc

SEQ ID NO: 33536 - RNA, 21 nt, synthetic construct
  source 1..21: mol_type = other RNA
aatacggcacgctcaccaatc

SEQ ID NO: 33537 - RNA, 21 nt, synthetic construct
  source 1..21: mol_type = other RNA
aatcacaatcactgcagcctc

SEQ ID NO: 33538 - RNA, 21 nt, synthetic construct
  source 1..21: mol_type = other RNA
aatcactgcagcctcacaggt

SEQ ID NO: 33539 - RNA, 21 nt, synthetic construct
  source 1..21: mol_type = other RNA
aatcccgctgtctctggctga

SEQ ID NO: 33540 - RNA, 21 nt, synthetic construct
  source 1..21: mol_type = other RNA
aatcgccggtgtgccttgaat

SEQ ID NO: 33541 - RNA, 21 nt, synthetic construct
  source 1..21: mol_type = other RNA
aatgaagagtaagtgaagccc

SEQ ID NO: 33542 - RNA, 21 nt, synthetic construct
  source 1..21: mol_type = other RNA
aatggtgatccacgcaggtgg

SEQ ID NO: 33543 - RNA, 21 nt, synthetic construct
  source 1..21: mol_type = other RNA
acaaactctactcggagctta

SEQ ID NO: 33544 - RNA, 21 nt, synthetic construct
  source 1..21: mol_type = other RNA
acaatcactgcagcctcacag

SEQ ID NO: 33545 - RNA, 21 nt, synthetic construct
  source 1..21: mol_type = other RNA
acacagtagcttctcttcact

SEQ ID NO: 33546 - RNA, 21 nt, synthetic construct
  source 1..21: mol_type = other RNA
acaccaggatgagaatcacaa

SEQ ID NO: 33547 - RNA, 21 nt, synthetic construct
  source 1..21: mol_type = other RNA
acaccggcgattggtgagcgt

SEQ ID NO: 33548 - RNA, 21 nt, synthetic construct
  source 1..21: mol_type = other RNA
acacctgtgaggctgcagtga

SEQ ID NO: 33549 - RNA, 21 nt, synthetic construct
  source 1..21: mol_type = other RNA
acagcgggattccttcccaca

SEQ ID NO: 33550 - RNA, 21 nt, synthetic construct
  source 1..21: mol_type = other RNA
acaggtgtggccagctcgctc

SEQ ID NO: 33551 - RNA, 21 nt, synthetic construct
  source 1..21: mol_type = other RNA
acagtagcttctcttcactgc

SEQ ID NO: 33552 - RNA, 21 nt, synthetic construct
  source 1..21: mol_type = other RNA
accaaacacagtagcttctct

SEQ ID NO: 33553 - RNA, 21 nt, synthetic construct
  source 1..21: mol_type = other RNA
accaatcgccggtgtgccttg

SEQ ID NO: 33554 - RNA, 21 nt, synthetic construct
  source 1..21: mol_type = other RNA
accacctgcgtggatcaccat

SEQ ID NO: 33555 - RNA, 21 nt, synthetic construct
  source 1..21: mol_type = other RNA
accaggatgagaatcacaatc

SEQ ID NO: 33556 - RNA, 21 nt, synthetic construct
  source 1..21: mol_type = other RNA
accgagacgctgaggaaatac

SEQ ID NO: 33557 - RNA, 21 nt, synthetic construct
  source 1..21: mol_type = other RNA
accggcgattggtgagcgtgc

SEQ ID NO: 33558 - RNA, 21 nt, synthetic construct
  source 1..21: mol_type = other RNA
acctgcgtggatcaccattcc

SEQ ID NO: 33559 - RNA, 21 nt, synthetic construct
  source 1..21: mol_type = other RNA
acctgtgaggctgcagtgatt

SEQ ID NO: 33560 - RNA, 21 nt, synthetic construct
  source 1..21: mol_type = other RNA
acgcaggtggttcgcagaagc

SEQ ID NO: 33561 - RNA, 21 nt, synthetic construct
  source 1..21: mol_type = other RNA
acgctcaccaatcgccggtgt

SEQ ID NO: 33562 - RNA, 21 nt, synthetic construct
  source 1..21: mol_type = other RNA
acgctgaggaaatacggcacg

SEQ ID NO: 33563 - RNA, 21 nt, synthetic construct
  source 1..21: mol_type = other RNA
acggcacgctcaccaatcgcc

SEQ ID NO: 33564 - RNA, 21 nt, synthetic construct
  source 1..21: mol_type = other RNA
actcggagcttaccgagacgc

SEQ ID NO: 33565 - RNA, 21 nt, synthetic construct
  source 1..21: mol_type = other RNA
actctactcggagcttaccga

SEQ ID NO: 33566 - RNA, 21 nt, synthetic construct
  source 1..21: mol_type = other RNA
actcttcattcaaggcacacc

SEQ ID NO: 33567 - RNA, 21 nt, synthetic construct
  source 1..21: mol_type = other RNA
actgcagcctcacaggtgtgg

SEQ ID NO: 33568 - RNA, 21 nt, synthetic construct
  source 1..21: mol_type = other RNA
actgctgcttctgcgaaccac

SEQ ID NO: 33569 - RNA, 21 nt, synthetic construct
  source 1..21: mol_type = other RNA
actgtgtttggtgcgggagcg

SEQ ID NO: 33570 - RNA, 21 nt, synthetic construct
  source 1..21: mol_type = other RNA
acttactcttcattcaaggca

SEQ ID NO: 33571 - RNA, 21 nt, synthetic construct
  source 1..21: mol_type = other RNA
agaagcagcagtgaagagaag

SEQ ID NO: 33572 - RNA, 21 nt, synthetic construct
  source 1..21: mol_type = other RNA
agaagctactgtgtttggtgc

SEQ ID NO: 33573 - RNA, 21 nt, synthetic construct
  source 1..21: mol_type = other RNA
agaatcacaatcactgcagcc

SEQ ID NO: 33574 - RNA, 21 nt, synthetic construct
  source 1..21: mol_type = other RNA
agacagcgggattccttccca

SEQ ID NO: 33575 - RNA, 21 nt, synthetic construct
  source 1..21: mol_type = other RNA
agacgctgaggaaatacggca

SEQ ID NO: 33576 - RNA, 21 nt, synthetic construct
  source 1..21: mol_type = other RNA
agagaagctactgtgtttggt

SEQ ID NO: 33577 - RNA, 21 nt, synthetic construct
  source 1..21: mol_type = other RNA
agagacagcgggattccttcc

SEQ ID NO: 33578 - RNA, 21 nt, synthetic construct
  source 1..21: mol_type = other RNA
agaggccctgggcttcactta

SEQ ID NO: 33579 - RNA, 21 nt, synthetic construct
  source 1..21: mol_type = other RNA
agaggggagaggccctgggct

SEQ ID NO: 33580 - RNA, 21 nt, synthetic construct
  source 1..21: mol_type = other RNA
agagtaagtgaagcccagggc

SEQ ID NO: 33581 - RNA, 21 nt, synthetic construct
  source 1..21: mol_type = other RNA
agagtttgtcagccagagaca

SEQ ID NO: 33582 - RNA, 21 nt, synthetic construct
  source 1..21: mol_type = other RNA
agcagcagtgaagagaagcta

SEQ ID NO: 33583 - RNA, 21 nt, synthetic construct
  source 1..21: mol_type = other RNA
agcagtgaagagaagctactg

SEQ ID NO: 33584 - RNA, 21 nt, synthetic construct
  source 1..21: mol_type = other RNA
agccagagacagcgggattcc

SEQ ID NO: 33585 - RNA, 21 nt, synthetic construct
  source 1..21: mol_type = other RNA
agcccagggcctctcccctct

SEQ ID NO: 33586 - RNA, 21 nt, synthetic construct
  source 1..21: mol_type = other RNA
agcctcacaggtgtggccagc

SEQ ID NO: 33587 - RNA, 21 nt, synthetic construct
  source 1..21: mol_type = other RNA
agcgagctggccacacctgtg

SEQ ID NO: 33588 - RNA, 21 nt, synthetic construct
  source 1..21: mol_type = other RNA
agcgggattccttcccacacc

SEQ ID NO: 33589 - RNA, 21 nt, synthetic construct
  source 1..21: mol_type = other RNA
agcgtctcggtaagctccgag

SEQ ID NO: 33590 - RNA, 21 nt, synthetic construct
  source 1..21: mol_type = other RNA
agcgtgccgtatttcctcagc

SEQ ID NO: 33591 - RNA, 21 nt, synthetic construct
  source 1..21: mol_type = other RNA
agctactgtgtttggtgcggg

SEQ ID NO: 33592 - RNA, 21 nt, synthetic construct
  source 1..21: mol_type = other RNA
agctccgagtagagtttgtca

SEQ ID NO: 33593 - RNA, 21 nt, synthetic construct
  source 1..21: mol_type = other RNA
agctcgctcccgcaccaaaca

SEQ ID NO: 33594 - RNA, 21 nt, synthetic construct
  source 1..21: mol_type = other RNA
agctggccacacctgtgaggc

SEQ ID NO: 33595 - RNA, 21 nt, synthetic construct
  source 1..21: mol_type = other RNA
agcttaccgagacgctgagga

SEQ ID NO: 33596 - RNA, 21 nt, synthetic construct
  source 1..21: mol_type = other RNA
agcttctcttcactgctgctt

SEQ ID NO: 33597 - RNA, 21 nt, synthetic construct
  source 1..21: mol_type = other RNA
aggaaatacggcacgctcacc

SEQ ID NO: 33598 - RNA, 21 nt, synthetic construct
  source 1..21: mol_type = other RNA
aggaatcccgctgtctctggc

SEQ ID NO: 33599 - RNA, 21 nt, synthetic construct
  source 1..21: mol_type = other RNA
aggatgagaatcacaatcact

SEQ ID NO: 33600 - RNA, 21 nt, synthetic construct
  source 1..21: mol_type = other RNA
aggcacaccggcgattggtga

SEQ ID NO: 33601 - RNA, 21 nt, synthetic construct
  source 1..21: mol_type = other RNA
aggccctgggcttcacttact

SEQ ID NO: 33602 - RNA, 21 nt, synthetic construct
  source 1..21: mol_type = other RNA
aggctgcagtgattgtgattc

SEQ ID NO: 33603 - RNA, 21 nt, synthetic construct
  source 1..21: mol_type = other RNA
aggggagaggccctgggcttc

SEQ ID NO: 33604 - RNA, 21 nt, synthetic construct
  source 1..21: mol_type = other RNA
aggtggttcgcagaagcagca

SEQ ID NO: 33605 - RNA, 21 nt, synthetic construct
  source 1..21: mol_type = other RNA
aggtgtggccagctcgctccc

SEQ ID NO: 33606 - RNA, 21 nt, synthetic construct
  source 1..21: mol_type = other RNA
agtaagtgaagcccagggcct

SEQ ID NO: 33607 - RNA, 21 nt, synthetic construct
  source 1..21: mol_type = other RNA
agtagagtttgtcagccagag

SEQ ID NO: 33608 - RNA, 21 nt, synthetic construct
  source 1..21: mol_type = other RNA
agtagcttctcttcactgctg

SEQ ID NO: 33609 - RNA, 21 nt, synthetic construct
  source 1..21: mol_type = other RNA
agtgaagagaagctactgtgt

SEQ ID NO: 33610 - RNA, 21 nt, synthetic construct
  source 1..21: mol_type = other RNA
agtgaagcccagggcctctcc

SEQ ID NO: 33611 - RNA, 21 nt, synthetic construct
  source 1..21: mol_type = other RNA
agtgattgtgattctcatcct

SEQ ID NO: 33612 - RNA, 21 nt, synthetic construct
  source 1..21: mol_type = other RNA
agtttgtcagccagagacagc

SEQ ID NO: 33613 - RNA, 21 nt, synthetic construct
  source 1..21: mol_type = other RNA
atacggcacgctcaccaatcg

SEQ ID NO: 33614 - RNA, 21 nt, synthetic construct
  source 1..21: mol_type = other RNA
atcacaatcactgcagcctca

SEQ ID NO: 33615 - RNA, 21 nt, synthetic construct
  source 1..21: mol_type = other RNA
atcaccattccatcccaaaca

SEQ ID NO: 33616 - RNA, 21 nt, synthetic construct
  source 1..21: mol_type = other RNA
atcactgcagcctcacaggtg

SEQ ID NO: 33617 - RNA, 21 nt, synthetic construct
  source 1..21: mol_type = other RNA
atccacgcaggtggttcgcag

SEQ ID NO: 33618 - RNA, 21 nt, synthetic construct
  source 1..21: mol_type = other RNA
atcccgctgtctctggctgac

SEQ ID NO: 33619 - RNA, 21 nt, synthetic construct
  source 1..21: mol_type = other RNA
atcctggtgtgggaaggaatc

SEQ ID NO: 33620 - RNA, 21 nt, synthetic construct
  source 1..21: mol_type = other RNA
atcgccggtgtgccttgaatg

SEQ ID NO: 33621 - RNA, 21 nt, synthetic construct
  source 1..21: mol_type = other RNA
atgaagagtaagtgaagccca

SEQ ID NO: 33622 - RNA, 21 nt, synthetic construct
  source 1..21: mol_type = other RNA
atgagaatcacaatcactgca

SEQ ID NO: 33623 - RNA, 21 nt, synthetic construct
  source 1..21: mol_type = other RNA
atggaatggtgatccacgcag

SEQ ID NO: 33624 - RNA, 21 nt, synthetic construct
  source 1..21: mol_type = other RNA
atggtgatccacgcaggtggt

SEQ ID NO: 33625 - RNA, 21 nt, synthetic construct
  source 1..21: mol_type = other RNA
attcaaggcacaccggcgatt

SEQ ID NO: 33626 - RNA, 21 nt, synthetic construct
  source 1..21: mol_type = other RNA
attccttcccacaccaggatg

SEQ ID NO: 33627 - RNA, 21 nt, synthetic construct
  source 1..21: mol_type = other RNA
attctcatcctggtgtgggaa

SEQ ID NO: 33628 - RNA, 21 nt, synthetic construct
  source 1..21: mol_type = other RNA
attggtgagcgtgccgtattt

SEQ ID NO: 33629 - RNA, 21 nt, synthetic construct
  source 1..21: mol_type = other RNA
attgtgattctcatcctggtg

SEQ ID NO: 33630 - RNA, 21 nt, synthetic construct
  source 1..21: mol_type = other RNA
atttcctcagcgtctcggtaa

SEQ ID NO: 33631 - RNA, 21 nt, synthetic construct
  source 1..21: mol_type = other RNA
caaacacagtagcttctcttc

SEQ ID NO: 33632 - RNA, 21 nt, synthetic construct
  source 1..21: mol_type = other RNA
caaactctactcggagcttac

SEQ ID NO: 33633 - RNA, 21 nt, synthetic construct
  source 1..21: mol_type = other RNA
caaagaggggagaggccctgg

SEQ ID NO: 33634 - RNA, 21 nt, synthetic construct
  source 1..21: mol_type = other RNA
caaggcacaccggcgattggt

SEQ ID NO: 33635 - RNA, 21 nt, synthetic construct
  source 1..21: mol_type = other RNA
caatcactgcagcctcacagg

SEQ ID NO: 33636 - RNA, 21 nt, synthetic construct
  source 1..21: mol_type = other RNA
caatcgccggtgtgccttgaa

SEQ ID NO: 33637 - RNA, 21 nt, synthetic construct
  source 1..21: mol_type = other RNA
cacaatcactgcagcctcaca

SEQ ID NO: 33638 - RNA, 21 nt, synthetic construct
  source 1..21: mol_type = other RNA
cacaccaggatgagaatcaca

SEQ ID NO: 33639 - RNA, 21 nt, synthetic construct
  source 1..21: mol_type = other RNA
cacaccggcgattggtgagcg

SEQ ID NO: 33640 - RNA, 21 nt, synthetic construct
  source 1..21: mol_type = other RNA
cacacctgtgaggctgcagtg

SEQ ID NO: 33641 - RNA, 21 nt, synthetic construct
  source 1..21: mol_type = other RNA
cacaggtgtggccagctcgct

SEQ ID NO: 33642 - RNA, 21 nt, synthetic construct
  source 1..21: mol_type = other RNA
cacagtagcttctcttcactg

SEQ ID NO: 33643 - RNA, 21 nt, synthetic construct
  source 1..21: mol_type = other RNA
caccaaacacagtagcttctc

SEQ ID NO: 33644 - RNA, 21 nt, synthetic construct
  source 1..21: mol_type = other RNA
caccaatcgccggtgtgcctt

SEQ ID NO: 33645 - RNA, 21 nt, synthetic construct
  source 1..21: mol_type = other RNA
caccaggatgagaatcacaat

SEQ ID NO: 33646 - RNA, 21 nt, synthetic construct
  source 1..21: mol_type = other RNA
caccattccatcccaaacacc

SEQ ID NO: 33647 - RNA, 21 nt, synthetic construct
  source 1..21: mol_type = other RNA
caccggcgattggtgagcgtg

SEQ ID NO: 33648 - RNA, 21 nt, synthetic construct
  source 1..21: mol_type = other RNA
cacctgcgtggatcaccattc

SEQ ID NO: 33649 - RNA, 21 nt, synthetic construct
  source 1..21: mol_type = other RNA
cacctgtgaggctgcagtgat

SEQ ID NO: 33650 - RNA, 21 nt, synthetic construct
  source 1..21: mol_type = other RNA
cacgcaggtggttcgcagaag

SEQ ID NO: 33651 - RNA, 21 nt, synthetic construct
  source 1..21: mol_type = other RNA
cacgctcaccaatcgccggtg

SEQ ID NO: 33652 - RNA, 21 nt, synthetic construct
  source 1..21: mol_type = other RNA
cactgcagcctcacaggtgtg

SEQ ID NO: 33653 - RNA, 21 nt, synthetic construct
  source 1..21: mol_type = other RNA
cactgctgcttctgcgaacca

SEQ ID NO: 33654 - RNA, 21 nt, synthetic construct
  source 1..21: mol_type = other RNA
cacttactcttcattcaaggc

SEQ ID NO: 33655 - RNA, 21 nt, synthetic construct
  source 1..21: mol_type = other RNA
cagaagcagcagtgaagagaa

SEQ ID NO: 33656 - RNA, 21 nt, synthetic construct
  source 1..21: mol_type = other RNA
cagagacagcgggattccttc

SEQ ID NO: 33657 - RNA, 21 nt, synthetic construct
  source 1..21: mol_type = other RNA
cagcagtgaagagaagctact

SEQ ID NO: 33658 - RNA, 21 nt, synthetic construct
  source 1..21: mol_type = other RNA
cagccagagacagcgggattc

SEQ ID NO: 33659 - RNA, 21 nt, synthetic construct
  source 1..21: mol_type = other RNA
cagcctcacaggtgtggccag

SEQ ID NO: 33660 - RNA, 21 nt, synthetic construct
  source 1..21: mol_type = other RNA
cagcgggattccttcccacac

SEQ ID NO: 33661 - RNA, 21 nt, synthetic construct
  source 1..21: mol_type = other RNA
cagcgtctcggtaagctccga

SEQ ID NO: 33662 - RNA, 21 nt, synthetic construct
  source 1..21: mol_type = other RNA
cagctcgctcccgcaccaaac

SEQ ID NO: 33663 - RNA, 21 nt, synthetic construct
  source 1..21: mol_type = other RNA
caggatgagaatcacaatcac

SEQ ID NO: 33664 - RNA, 21 nt, synthetic construct
  source 1..21: mol_type = other RNA
caggtggttcgcagaagcagc

SEQ ID NO: 33665 - RNA, 21 nt, synthetic construct
  source 1..21: mol_type = other RNA
caggtgtggccagctcgctcc

SEQ ID NO: 33666 - RNA, 21 nt, synthetic construct
  source 1..21: mol_type = other RNA
cagtagcttctcttcactgct

SEQ ID NO: 33667 - RNA, 21 nt, synthetic construct
  source 1..21: mol_type = other RNA
cagtgaagagaagctactgtg

SEQ ID NO: 33668 - RNA, 21 nt, synthetic construct
  source 1..21: mol_type = other RNA
cagtgattgtgattctcatcc

SEQ ID NO: 33669 - RNA, 21 nt, synthetic construct
  source 1..21: mol_type = other RNA
catcctggtgtgggaaggaat

SEQ ID NO: 33670 - RNA, 21 nt, synthetic construct
  source 1..21: mol_type = other RNA
cattcaaggcacaccggcgat

SEQ ID NO: 33671 - RNA, 21 nt, synthetic construct
  source 1..21: mol_type = other RNA
ccaaacacagtagcttctctt

SEQ ID NO: 33672 - RNA, 21 nt, synthetic construct
  source 1..21: mol_type = other RNA
ccaatcgccggtgtgccttga

SEQ ID NO: 33673 - RNA, 21 nt, synthetic construct
  source 1..21: mol_type = other RNA
ccacaccaggatgagaatcac

SEQ ID NO: 33674 - RNA, 21 nt, synthetic construct
  source 1..21: mol_type = other RNA
ccacacctgtgaggctgcagt

SEQ ID NO: 33675 - RNA, 21 nt, synthetic construct
  source 1..21: mol_type = other RNA
ccacctgcgtggatcaccatt

SEQ ID NO: 33676 - RNA, 21 nt, synthetic construct
  source 1..21: mol_type = other RNA
ccacgcaggtggttcgcagaa

SEQ ID NO: 33677 - RNA, 21 nt, synthetic construct
  source 1..21: mol_type = other RNA
ccagagacagcgggattcctt

SEQ ID NO: 33678 - RNA, 21 nt, synthetic construct
  source 1..21: mol_type = other RNA
ccagctcgctcccgcaccaaa

SEQ ID NO: 33679 - RNA, 21 nt, synthetic construct
  source 1..21: mol_type = other RNA
ccaggatgagaatcacaatca

SEQ ID NO: 33680 - RNA, 21 nt, synthetic construct
  source 1..21: mol_type = other RNA
cccacaccaggatgagaatca

SEQ ID NO: 33681 - RNA, 21 nt, synthetic construct
  source 1..21: mol_type = other RNA
cccgcaccaaacacagtagct

SEQ ID NO: 33682 - RNA, 21 nt, synthetic construct
  source 1..21: mol_type = other RNA
cccgctgtctctggctgacaa

SEQ ID NO: 33683 - RNA, 21 nt, synthetic construct
  source 1..21: mol_type = other RNA
ccctgggcttcacttactctt

SEQ ID NO: 33684 - RNA, 21 nt, synthetic construct
  source 1..21: mol_type = other RNA
ccgagacgctgaggaaatacg

SEQ ID NO: 33685 - RNA, 21 nt, synthetic construct
  source 1..21: mol_type = other RNA
ccgagtagagtttgtcagcca

SEQ ID NO: 33686 - RNA, 21 nt, synthetic construct
  source 1..21: mol_type = other RNA
ccgcaaagaggggagaggccc

SEQ ID NO: 33687 - RNA, 21 nt, synthetic construct
  source 1..21: mol_type = other RNA
ccgcaccaaacacagtagctt

SEQ ID NO: 33688 - RNA, 21 nt, synthetic construct
  source 1..21: mol_type = other RNA
ccgctgtctctggctgacaaa

SEQ ID NO: 33689 - RNA, 21 nt, synthetic construct
  source 1..21: mol_type = other RNA
ccggcgattggtgagcgtgcc

SEQ ID NO: 33690 - RNA, 21 nt, synthetic construct
  source 1..21: mol_type = other RNA
ccggtgtgccttgaatgaaga

SEQ ID NO: 33691 - RNA, 21 nt, synthetic construct
  source 1..21: mol_type = other RNA
ccgtatttcctcagcgtctcg

SEQ ID NO: 33692 - RNA, 21 nt, synthetic construct
  source 1..21: mol_type = other RNA
cctcacaggtgtggccagctc

SEQ ID NO: 33693 - RNA, 21 nt, synthetic construct
  source 1..21: mol_type = other RNA
cctcagcgtctcggtaagctc

SEQ ID NO: 33694 - RNA, 21 nt, synthetic construct
  source 1..21: mol_type = other RNA
cctgcgtggatcaccattcca

SEQ ID NO: 33695 - RNA, 21 nt, synthetic construct
  source 1..21: mol_type = other RNA
cctgggcttcacttactcttc

SEQ ID NO: 33696 - RNA, 21 nt, synthetic construct
  source 1..21: mol_type = other RNA
cctggtgtgggaaggaatccc

SEQ ID NO: 33697 - RNA, 21 nt, synthetic construct
  source 1..21: mol_type = other RNA
cctgtgaggctgcagtgattg

SEQ ID NO: 33698 - RNA, 21 nt, synthetic construct
  source 1..21: mol_type = other RNA
ccttcccacaccaggatgaga

SEQ ID NO: 33699 - RNA, 21 nt, synthetic construct
  source 1..21: mol_type = other RNA
ccttgaatgaagagtaagtga

SEQ ID NO: 33700 - RNA, 21 nt, synthetic construct
  source 1..21: mol_type = other RNA
cgaaccacctgcgtggatcac

SEQ ID NO: 33701 - RNA, 21 nt, synthetic construct
  source 1..21: mol_type = other RNA
cgagacgctgaggaaatacgg

SEQ ID NO: 33702 - RNA, 21 nt, synthetic construct
  source 1..21: mol_type = other RNA
cgagctggccacacctgtgag

SEQ ID NO: 33703 - RNA, 21 nt, synthetic construct
  source 1..21: mol_type = other RNA
cgagtagagtttgtcagccag

SEQ ID NO: 33704 - RNA, 21 nt, synthetic construct
  source 1..21: mol_type = other RNA
cgattggtgagcgtgccgtat

SEQ ID NO: 33705 - RNA, 21 nt, synthetic construct
  source 1..21: mol_type = other RNA
cgcaaagaggggagaggccct

SEQ ID NO: 33706 - RNA, 21 nt, synthetic construct
  source 1..21: mol_type = other RNA
cgcaccaaacacagtagcttc

SEQ ID NO: 33707 - RNA, 21 nt, synthetic construct
  source 1..21: mol_type = other RNA
cgcagaagcagcagtgaagag

SEQ ID NO: 33708 - RNA, 21 nt, synthetic construct
  source 1..21: mol_type = other RNA
cgcaggtggttcgcagaagca

SEQ ID NO: 33709 - RNA, 21 nt, synthetic construct
  source 1..21: mol_type = other RNA
cgccggtgtgccttgaatgaa

SEQ ID NO: 33710 - RNA, 21 nt, synthetic construct
  source 1..21: mol_type = other RNA
cgctcaccaatcgccggtgtg

SEQ ID NO: 33711 - RNA, 21 nt, synthetic construct
  source 1..21: mol_type = other RNA
cgctcccgcaccaaacacagt

SEQ ID NO: 33712 - RNA, 21 nt, synthetic construct
  source 1..21: mol_type = other RNA
cgctgaggaaatacggcacgc

SEQ ID NO: 33713 - RNA, 21 nt, synthetic construct
  source 1..21: mol_type = other RNA
cgctgtctctggctgacaaac

SEQ ID NO: 33714 - RNA, 21 nt, synthetic construct
  source 1..21: mol_type = other RNA
cggagcttaccgagacgctga

SEQ ID NO: 33715 - RNA, 21 nt, synthetic construct
  source 1..21: mol_type = other RNA
cggcacgctcaccaatcgccg

SEQ ID NO: 33716 - RNA, 21 nt, synthetic construct
  source 1..21: mol_type = other RNA
cggcgattggtgagcgtgccg

SEQ ID NO: 33717 - RNA, 21 nt, synthetic construct
  source 1..21: mol_type = other RNA
cgggagcgagctggccacacc

SEQ ID NO: 33718 - RNA, 21 nt, synthetic construct
  source 1..21: mol_type = other RNA
cgggattccttcccacaccag

SEQ ID NO: 33719 - RNA, 21 nt, synthetic construct
  source 1..21: mol_type = other RNA
cggtaagctccgagtagagtt

SEQ ID NO: 33720 - RNA, 21 nt, synthetic construct
  source 1..21: mol_type = other RNA
cggtgtgccttgaatgaagag

SEQ ID NO: 33721 - RNA, 21 nt, synthetic construct
  source 1..21: mol_type = other RNA
cgtatttcctcagcgtctcgg

SEQ ID NO: 33722 - RNA, 21 nt, synthetic construct
  source 1..21: mol_type = other RNA
cgtctcggtaagctccgagta

SEQ ID NO: 33723 - RNA, 21 nt, synthetic construct
  source 1..21: mol_type = other RNA
cgtgccgtatttcctcagcgt

SEQ ID NO: 33724 - RNA, 21 nt, synthetic construct
  source 1..21: mol_type = other RNA
cgtggatcaccattccatccc

SEQ ID NO: 33725 - RNA, 21 nt, synthetic construct
  source 1..21: mol_type = other RNA
ctactcggagcttaccgagac

SEQ ID NO: 33726 - RNA, 21 nt, synthetic construct
  source 1..21: mol_type = other RNA
ctactgtgtttggtgcgggag

SEQ ID NO: 33727 - RNA, 21 nt, synthetic construct
  source 1..21: mol_type = other RNA
ctcacaggtgtggccagctcg

SEQ ID NO: 33728 - RNA, 21 nt, synthetic construct
  source 1..21: mol_type = other RNA
ctcaccaatcgccggtgtgcc

SEQ ID NO: 33729 - RNA, 21 nt, synthetic construct
  source 1..21: mol_type = other RNA
ctcagcgtctcggtaagctcc

SEQ ID NO: 33730 - RNA, 21 nt, synthetic construct
  source 1..21: mol_type = other RNA
ctcatcctggtgtgggaagga

SEQ ID NO: 33731 - RNA, 21 nt, synthetic construct
  source 1..21: mol_type = other RNA
ctcccgcaccaaacacagtag

SEQ ID NO: 33732 - RNA, 21 nt, synthetic construct
  source 1..21: mol_type = other RNA
ctccgagtagagtttgtcagc

SEQ ID NO: 33733 - RNA, 21 nt, synthetic construct
  source 1..21: mol_type = other RNA
ctcgctcccgcaccaaacaca

SEQ ID NO: 33734 - RNA, 21 nt, synthetic construct
  source 1..21: mol_type = other RNA
ctcggagcttaccgagacgct

SEQ ID NO: 33735 - RNA, 21 nt, synthetic construct
  source 1..21: mol_type = other RNA
ctcggtaagctccgagtagag

SEQ ID NO: 33736 - RNA, 21 nt, synthetic construct
  source 1..21: mol_type = other RNA
ctctactcggagcttaccgag

SEQ ID NO: 33737 - RNA, 21 nt, synthetic construct
  source 1..21: mol_type = other RNA
ctctggctgacaaactctact

SEQ ID NO: 33738 - RNA, 21 nt, synthetic construct
  source 1..21: mol_type = other RNA
ctcttcactgctgcttctgcg

SEQ ID NO: 33739 - RNA, 21 nt, synthetic construct
  source 1..21: mol_type = other RNA
ctcttcattcaaggcacaccg

SEQ ID NO: 33740 - RNA, 21 nt, synthetic construct
  source 1..21: mol_type = other RNA
ctgacaaactctactcggagc

SEQ ID NO: 33741 - RNA, 21 nt, synthetic construct
  source 1..21: mol_type = other RNA
ctgaggaaatacggcacgctc

SEQ ID NO: 33742 - RNA, 21 nt, synthetic construct
  source 1..21: mol_type = other RNA
ctgcagcctcacaggtgtggc

SEQ ID NO: 33743 - RNA, 21 nt, synthetic construct
  source 1..21: mol_type = other RNA
ctgcagtgattgtgattctca

SEQ ID NO: 33744 - RNA, 21 nt, synthetic construct
  source 1..21: mol_type = other RNA
ctgcgaaccacctgcgtggat

SEQ ID NO: 33745 - RNA, 21 nt, synthetic construct
  source 1..21: mol_type = other RNA
ctgcgtggatcaccattccat

SEQ ID NO: 33746 - RNA, 21 nt, synthetic construct
  source 1..21: mol_type = other RNA
ctgctgcttctgcgaaccacc

SEQ ID NO: 33747 - RNA, 21 nt, synthetic construct
  source 1..21: mol_type = other RNA
ctgcttctgcgaaccacctgc

SEQ ID NO: 33748 - RNA, 21 nt, synthetic construct
  source 1..21: mol_type = other RNA
ctggccacacctgtgaggctg

SEQ ID NO: 33749 - RNA, 21 nt, synthetic construct
  source 1..21: mol_type = other RNA
ctggctgacaaactctactcg

SEQ ID NO: 33750 - RNA, 21 nt, synthetic construct
  source 1..21: mol_type = other RNA
ctgggcttcacttactcttca

SEQ ID NO: 33751 - RNA, 21 nt, synthetic construct
  source 1..21: mol_type = other RNA
ctggtgtgggaaggaatcccg

SEQ ID NO: 33752 - RNA, 21 nt, synthetic construct
  source 1..21: mol_type = other RNA
ctgtctctggctgacaaactc

SEQ ID NO: 33753 - RNA, 21 nt, synthetic construct
  source 1..21: mol_type = other RNA
ctgtgaggctgcagtgattgt

SEQ ID NO: 33754 - RNA, 21 nt, synthetic construct
  source 1..21: mol_type = other RNA
ctgtgtttggtgcgggagcga

SEQ ID NO: 33755 - RNA, 21 nt, synthetic construct
  source 1..21: mol_type = other RNA
cttaccgagacgctgaggaaa

SEQ ID NO: 33756 - RNA, 21 nt, synthetic construct
  source 1..21: mol_type = other RNA
cttactcttcattcaaggcac

SEQ ID NO: 33757 - RNA, 21 nt, synthetic construct
  source 1..21: mol_type = other RNA
cttcactgctgcttctgcgaa

SEQ ID NO: 33758 - RNA, 21 nt, synthetic construct
  source 1..21: mol_type = other RNA
cttcacttactcttcattcaa

SEQ ID NO: 33759 - RNA, 21 nt, synthetic construct
  source 1..21: mol_type = other RNA
cttcattcaaggcacaccggc

SEQ ID NO: 33760 - RNA, 21 nt, synthetic construct
  source 1..21: mol_type = other RNA
cttcccacaccaggatgagaa

SEQ ID NO: 33761 - RNA, 21 nt, synthetic construct
  source 1..21: mol_type = other RNA
cttctcttcactgctgcttct

SEQ ID NO: 33762 - RNA, 21 nt, synthetic construct
  source 1..21: mol_type = other RNA
cttctgcgaaccacctgcgtg

SEQ ID NO: 33763 - RNA, 21 nt, synthetic construct
  source 1..21: mol_type = other RNA
cttgaatgaagagtaagtgaa

SEQ ID NO: 33764 - RNA, 21 nt, synthetic construct
  source 1..21: mol_type = other RNA
gaaatacggcacgctcaccaa

SEQ ID NO: 33765 - RNA, 21 nt, synthetic construct
  source 1..21: mol_type = other RNA
gaaccacctgcgtggatcacc

SEQ ID NO: 33766 - RNA, 21 nt, synthetic construct
  source 1..21: mol_type = other RNA
gaagagaagctactgtgtttg

SEQ ID NO: 33767 - RNA, 21 nt, synthetic construct
  source 1..21: mol_type = other RNA
gaagagtaagtgaagcccagg

SEQ ID NO: 33768 - RNA, 21 nt, synthetic construct
  source 1..21: mol_type = other RNA
gaagcagcagtgaagagaagc

SEQ ID NO: 33769 - RNA, 21 nt, synthetic construct
  source 1..21: mol_type = other RNA
gaagcccagggcctctcccct

SEQ ID NO: 33770 - RNA, 21 nt, synthetic construct
  source 1..21: mol_type = other RNA
gaagctactgtgtttggtgcg

SEQ ID NO: 33771 - RNA, 21 nt, synthetic construct
  source 1..21: mol_type = other RNA
gaaggaatcccgctgtctctg

SEQ ID NO: 33772 - RNA, 21 nt, synthetic construct
  source 1..21: mol_type = other RNA
gaatcacaatcactgcagcct

SEQ ID NO: 33773 - RNA, 21 nt, synthetic construct
  source 1..21: mol_type = other RNA
gaatcccgctgtctctggctg

SEQ ID NO: 33774 - RNA, 21 nt, synthetic construct
  source 1..21: mol_type = other RNA
gaatgaagagtaagtgaagcc

SEQ ID NO: 33775 - RNA, 21 nt, synthetic construct
  source 1..21: mol_type = other RNA
gaatggtgatccacgcaggtg

SEQ ID NO: 33776 - RNA, 21 nt, synthetic construct
  source 1..21: mol_type = other RNA
gacaaactctactcggagctt

SEQ ID NO: 33777 - RNA, 21 nt, synthetic construct
  source 1..21: mol_type = other RNA
gacagcgggattccttcccac

SEQ ID NO: 33778 - RNA, 21 nt, synthetic construct
  source 1..21: mol_type = other RNA
gacgctgaggaaatacggcac

SEQ ID NO: 33779 - RNA, 21 nt, synthetic construct
  source 1..21: mol_type = other RNA
gagaagctactgtgtttggtg

SEQ ID NO: 33780 - RNA, 21 nt, synthetic construct
  source 1..21: mol_type = other RNA
gagaatcacaatcactgcagc

SEQ ID NO: 33781 - RNA, 21 nt, synthetic construct
  source 1..21: mol_type = other RNA
gagacagcgggattccttccc

SEQ ID NO: 33782 - RNA, 21 nt, synthetic construct
  source 1..21: mol_type = other RNA
gagacgctgaggaaatacggc

SEQ ID NO: 33783 - RNA, 21 nt, synthetic construct
  source 1..21: mol_type = other RNA
gagaggccctgggcttcactt

SEQ ID NO: 33784 - RNA, 21 nt, synthetic construct
  source 1..21: mol_type = other RNA
gagcgagctggccacacctgt

SEQ ID NO: 33785 - RNA, 21 nt, synthetic construct
  source 1..21: mol_type = other RNA
gagcgtgccgtatttcctcag

SEQ ID NO: 33786 - RNA, 21 nt, synthetic construct
  source 1..21: mol_type = other RNA
gagctggccacacctgtgagg

SEQ ID NO: 33787 - RNA, 21 nt, synthetic construct
  source 1..21: mol_type = other RNA
gagcttaccgagacgctgagg

SEQ ID NO: 33788 - RNA, 21 nt, synthetic construct
  source 1..21: mol_type = other RNA
gaggaaatacggcacgctcac

SEQ ID NO: 33789 - RNA, 21 nt, synthetic construct
  source 1..21: mol_type = other RNA
gaggccctgggcttcacttac

SEQ ID NO: 33790 - RNA, 21 nt, synthetic construct
  source 1..21: mol_type = other RNA
gaggctgcagtgattgtgatt

SEQ ID NO: 33791 - RNA, 21 nt, synthetic construct
  source 1..21: mol_type = other RNA
gaggggagaggccctgggctt

SEQ ID NO: 33792 - RNA, 21 nt, synthetic construct
  source 1..21: mol_type = other RNA
gagtaagtgaagcccagggcc

SEQ ID NO: 33793 - RNA, 21 nt, synthetic construct
  source 1..21: mol_type = other RNA
gagtagagtttgtcagccaga

SEQ ID NO: 33794 - RNA, 21 nt, synthetic construct
  source 1..21: mol_type = other RNA
gagtttgtcagccagagacag

SEQ ID NO: 33795 - RNA, 21 nt, synthetic construct
  source 1..21: mol_type = other RNA
gatcaccattccatcccaaac

SEQ ID NO: 33796 - RNA, 21 nt, synthetic construct
  source 1..21: mol_type = other RNA
gatccacgcaggtggttcgca

SEQ ID NO: 33797 - RNA, 21 nt, synthetic construct
  source 1..21: mol_type = other RNA
gatgagaatcacaatcactgc

SEQ ID NO: 33798 - RNA, 21 nt, synthetic construct
  source 1..21: mol_type = other RNA
gatggaatggtgatccacgca

SEQ ID NO: 33799 - RNA, 21 nt, synthetic construct
  source 1..21: mol_type = other RNA
gattccttcccacaccaggat

SEQ ID NO: 33800 - RNA, 21 nt, synthetic construct
  source 1..21: mol_type = other RNA
gattctcatcctggtgtggga

SEQ ID NO: 33801 - RNA, 21 nt, synthetic construct
  source 1..21: mol_type = other RNA
gattggtgagcgtgccgtatt

SEQ ID NO: 33802 - RNA, 21 nt, synthetic construct
  source 1..21: mol_type = other RNA
gattgtgattctcatcctggt

SEQ ID NO: 33803 - RNA, 21 nt, synthetic construct
  source 1..21: mol_type = other RNA
gcaaagaggggagaggccctg

SEQ ID NO: 33804 - RNA, 21 nt, synthetic construct
  source 1..21: mol_type = other RNA
gcacaccggcgattggtgagc

SEQ ID NO: 33805 - RNA, 21 nt, synthetic construct
  source 1..21: mol_type = other RNA
gcaccaaacacagtagcttct

SEQ ID NO: 33806 - RNA, 21 nt, synthetic construct
  source 1..21: mol_type = other RNA
gcacgctcaccaatcgccggt

SEQ ID NO: 33807 - RNA, 21 nt, synthetic construct
  source 1..21: mol_type = other RNA
gcagaagcagcagtgaagaga

SEQ ID NO: 33808 - RNA, 21 nt, synthetic construct
  source 1..21: mol_type = other RNA
gcagcagtgaagagaagctac

SEQ ID NO: 33809 - RNA, 21 nt, synthetic construct
  source 1..21: mol_type = other RNA
gcagcctcacaggtgtggcca

SEQ ID NO: 33810 - RNA, 21 nt, synthetic construct
  source 1..21: mol_type = other RNA
gcaggtggttcgcagaagcag

SEQ ID NO: 33811 - RNA, 21 nt, synthetic construct
  source 1..21: mol_type = other RNA
gcagtgaagagaagctactgt

SEQ ID NO: 33812 - RNA, 21 nt, synthetic construct
  source 1..21: mol_type = other RNA
gcagtgattgtgattctcatc

SEQ ID NO: 33813 - RNA, 21 nt, synthetic construct
  source 1..21: mol_type = other RNA
gccacacctgtgaggctgcag

SEQ ID NO: 33814 - RNA, 21 nt, synthetic construct
  source 1..21: mol_type = other RNA
gccagagacagcgggattcct

SEQ ID NO: 33815 - RNA, 21 nt, synthetic construct
  source 1..21: mol_type = other RNA
gccagctcgctcccgcaccaa

SEQ ID NO: 33816 - RNA, 21 nt, synthetic construct
  source 1..21: mol_type = other RNA
gcccagggcctctcccctctt

SEQ ID NO: 33817 - RNA, 21 nt, synthetic construct
  source 1..21: mol_type = other RNA
gccctgggcttcacttactct

SEQ ID NO: 33818 - RNA, 21 nt, synthetic construct
  source 1..21: mol_type = other RNA
gccgcaaagaggggagaggcc

SEQ ID NO: 33819 - RNA, 21 nt, synthetic construct
  source 1..21: mol_type = other RNA
gccggtgtgccttgaatgaag

SEQ ID NO: 33820 - RNA, 21 nt, synthetic construct
  source 1..21: mol_type = other RNA
gccgtatttcctcagcgtctc

SEQ ID NO: 33821 - RNA, 21 nt, synthetic construct
  source 1..21: mol_type = other RNA
gcctcacaggtgtggccagct

SEQ ID NO: 33822 - RNA, 21 nt, synthetic construct
  source 1..21: mol_type = other RNA
gccttgaatgaagagtaagtg

SEQ ID NO: 33823 - RNA, 21 nt, synthetic construct
  source 1..21: mol_type = other RNA
gcgaaccacctgcgtggatca

SEQ ID NO: 33824 - RNA, 21 nt, synthetic construct
  source 1..21: mol_type = other RNA
gcgagctggccacacctgtga

SEQ ID NO: 33825 - RNA, 21 nt, synthetic construct
  source 1..21: mol_type = other RNA
gcgattggtgagcgtgccgta

SEQ ID NO: 33826 - RNA, 21 nt, synthetic construct
  source 1..21: mol_type = other RNA
gcgggagcgagctggccacac

SEQ ID NO: 33827 - RNA, 21 nt, synthetic construct
  source 1..21: mol_type = other RNA
gcgggattccttcccacacca

SEQ ID NO: 33828 - RNA, 21 nt, synthetic construct
  source 1..21: mol_type = other RNA
gcgtctcggtaagctccgagt

SEQ ID NO: 33829 - RNA, 21 nt, synthetic construct
  source 1..21: mol_type = other RNA
gcgtgccgtatttcctcagcg

SEQ ID NO: 33830 - RNA, 21 nt, synthetic construct
  source 1..21: mol_type = other RNA
gcgtggatcaccattccatcc

SEQ ID NO: 33831 - RNA, 21 nt, synthetic construct
  source 1..21: mol_type = other RNA
gctactgtgtttggtgcggga

SEQ ID NO: 33832 - RNA, 21 nt, synthetic construct
  source 1..21: mol_type = other RNA
gctcaccaatcgccggtgtgc

SEQ ID NO: 33833 - RNA, 21 nt, synthetic construct
  source 1..21: mol_type = other RNA
gctcccgcaccaaacacagta

SEQ ID NO: 33834 - RNA, 21 nt, synthetic construct
  source 1..21: mol_type = other RNA
gctccgagtagagtttgtcag

SEQ ID NO: 33835 - RNA, 21 nt, synthetic construct
  source 1..21: mol_type = other RNA
gctcgctcccgcaccaaacac

SEQ ID NO: 33836 - RNA, 21 nt, synthetic construct
  source 1..21: mol_type = other RNA
gctgacaaactctactcggag

SEQ ID NO: 33837 - RNA, 21 nt, synthetic construct
  source 1..21: mol_type = other RNA
gctgaggaaatacggcacgct

SEQ ID NO: 33838 - RNA, 21 nt, synthetic construct
  source 1..21: mol_type = other RNA
gctgcagtgattgtgattctc

SEQ ID NO: 33839 - RNA, 21 nt, synthetic construct
  source 1..21: mol_type = other RNA
gctgcttctgcgaaccacctg

SEQ ID NO: 33840 - RNA, 21 nt, synthetic construct
  source 1..21: mol_type = other RNA
gctggccacacctgtgaggct

SEQ ID NO: 33841 - RNA, 21 nt, synthetic construct
  source 1..21: mol_type = other RNA
gctgtctctggctgacaaact

SEQ ID NO: 33842 - RNA, 21 nt, synthetic construct
  source 1..21: mol_type = other RNA
gcttaccgagacgctgaggaa

SEQ ID NO: 33843 - RNA, 21 nt, synthetic construct
  source 1..21: mol_type = other RNA
gcttcacttactcttcattca

SEQ ID NO: 33844 - RNA, 21 nt, synthetic construct
  source 1..21: mol_type = other RNA
gcttctcttcactgctgcttc

SEQ ID NO: 33845 - RNA, 21 nt, synthetic construct
  source 1..21: mol_type = other RNA
gcttctgcgaaccacctgcgt

SEQ ID NO: 33846 - RNA, 21 nt, synthetic construct
  source 1..21: mol_type = other RNA
ggaaatacggcacgctcacca

SEQ ID NO: 33847 - RNA, 21 nt, synthetic construct
  source 1..21: mol_type = other RNA
ggaaggaatcccgctgtctct

SEQ ID NO: 33848 - RNA, 21 nt, synthetic construct
  source 1..21: mol_type = other RNA
ggaatcccgctgtctctggct

SEQ ID NO: 33849 - RNA, 21 nt, synthetic construct
  source 1..21: mol_type = other RNA
ggaatggtgatccacgcaggt

SEQ ID NO: 33850 - RNA, 21 nt, synthetic construct
  source 1..21: mol_type = other RNA
ggagaggccctgggcttcact

SEQ ID NO: 33851 - RNA, 21 nt, synthetic construct
  source 1..21: mol_type = other RNA
ggagcgagctggccacacctg

SEQ ID NO: 33852 - RNA, 21 nt, synthetic construct
  source 1..21: mol_type = other RNA
ggagcttaccgagacgctgag

SEQ ID NO: 33853 - RNA, 21 nt, synthetic construct
  source 1..21: mol_type = other RNA
ggatcaccattccatcccaaa

SEQ ID NO: 33854 - RNA, 21 nt, synthetic construct
  source 1..21: mol_type = other RNA
ggatgagaatcacaatcactg

SEQ ID NO: 33855 - RNA, 21 nt, synthetic construct
  source 1..21: mol_type = other RNA
ggatggaatggtgatccacgc

SEQ ID NO: 33856 - RNA, 21 nt, synthetic construct
  source 1..21: mol_type = other RNA
ggattccttcccacaccagga

SEQ ID NO: 33857 - RNA, 21 nt, synthetic construct
  source 1..21: mol_type = other RNA
ggcacaccggcgattggtgag

SEQ ID NO: 33858 - RNA, 21 nt, synthetic construct
  source 1..21: mol_type = other RNA
ggcacgctcaccaatcgccgg

SEQ ID NO: 33859 - RNA, 21 nt, synthetic construct
  source 1..21: mol_type = other RNA
ggccacacctgtgaggctgca

SEQ ID NO: 33860 - RNA, 21 nt, synthetic construct
  source 1..21: mol_type = other RNA
ggccagctcgctcccgcacca

SEQ ID NO: 33861 - RNA, 21 nt, synthetic construct
  source 1..21: mol_type = other RNA
ggccctgggcttcacttactc

SEQ ID NO: 33862 - RNA, 21 nt, synthetic construct
  source 1..21: mol_type = other RNA
ggccgcaaagaggggagaggc

SEQ ID NO: 33863 - RNA, 21 nt, synthetic construct
  source 1..21: mol_type = other RNA
ggcgattggtgagcgtgccgt

SEQ ID NO: 33864 - RNA, 21 nt, synthetic construct
  source 1..21: mol_type = other RNA
ggctgacaaactctactcgga

SEQ ID NO: 33865 - RNA, 21 nt, synthetic construct
  source 1..21: mol_type = other RNA
ggctgcagtgattgtgattct

SEQ ID NO: 33866 - RNA, 21 nt, synthetic construct
  source 1..21: mol_type = other RNA
ggcttcacttactcttcattc

SEQ ID NO: 33867 - RNA, 21 nt, synthetic construct
  source 1..21: mol_type = other RNA
gggaaggaatcccgctgtctc

SEQ ID NO: 33868 - RNA, 21 nt, synthetic construct
  source 1..21: mol_type = other RNA
gggagaggccctgggcttcac

SEQ ID NO: 33869 - RNA, 21 nt, synthetic construct
  source 1..21: mol_type = other RNA
gggagcgagctggccacacct

SEQ ID NO: 33870 - RNA, 21 nt, synthetic construct
  source 1..21: mol_type = other RNA
gggatggaatggtgatccacg

SEQ ID NO: 33871 - RNA, 21 nt, synthetic construct
  source 1..21: mol_type = other RNA
gggattccttcccacaccagg

SEQ ID NO: 33872 - RNA, 21 nt, synthetic construct
  source 1..21: mol_type = other RNA
gggcttcacttactcttcatt

SEQ ID NO: 33873 - RNA, 21 nt, synthetic construct
  source 1..21: mol_type = other RNA
ggggagaggccctgggcttca

SEQ ID NO: 33874 - RNA, 21 nt, synthetic construct
  source 1..21: mol_type = other RNA
ggggggtgtttgggatggaat

SEQ ID NO: 33875 - RNA, 21 nt, synthetic construct
  source 1..21: mol_type = other RNA
gggggtgtttgggatggaatg

SEQ ID NO: 33876 - RNA, 21 nt, synthetic construct
  source 1..21: mol_type = other RNA
ggggtgtttgggatggaatgg

SEQ ID NO: 33877 - RNA, 21 nt, synthetic construct
  source 1..21: mol_type = other RNA
gggtggggggtgtttgggatg

SEQ ID NO: 33878 - RNA, 21 nt, synthetic construct
  source 1..21: mol_type = other RNA
gggtgtttgggatggaatggt

SEQ ID NO: 33879 - RNA, 21 nt, synthetic construct
  source 1..21: mol_type = other RNA
ggtaagctccgagtagagttt

SEQ ID NO: 33880 - RNA, 21 nt, synthetic construct
  source 1..21: mol_type = other RNA
ggtgagcgtgccgtatttcct

SEQ ID NO: 33881 - RNA, 21 nt, synthetic construct
  source 1..21: mol_type = other RNA
ggtgatccacgcaggtggttc

SEQ ID NO: 33882 - RNA, 21 nt, synthetic construct
  source 1..21: mol_type = other RNA
ggtgcgggagcgagctggcca

SEQ ID NO: 33883 - RNA, 21 nt, synthetic construct
  source 1..21: mol_type = other RNA
ggtggggggtgtttgggatgg

SEQ ID NO: 33884 - RNA, 21 nt, synthetic construct
  source 1..21: mol_type = other RNA
ggtggttcgcagaagcagcag

SEQ ID NO: 33885 - RNA, 21 nt, synthetic construct
  source 1..21: mol_type = other RNA
ggtgtgccttgaatgaagagt

SEQ ID NO: 33886 - RNA, 21 nt, synthetic construct
  source 1..21: mol_type = other RNA
ggtgtggccagctcgctcccg

SEQ ID NO: 33887 - RNA, 21 nt, synthetic construct
  source 1..21: mol_type = other RNA
ggtgtgggaaggaatcccgct

SEQ ID NO: 33888 - RNA, 21 nt, synthetic construct
  source 1..21: mol_type = other RNA
ggtgtttgggatggaatggtg

SEQ ID NO: 33889 - RNA, 21 nt, synthetic construct
  source 1..21: mol_type = other RNA
ggttcgcagaagcagcagtga

SEQ ID NO: 33890 - RNA, 21 nt, synthetic construct
  source 1..21: mol_type = other RNA
gtaagctccgagtagagtttg

SEQ ID NO: 33891 - RNA, 21 nt, synthetic construct
  source 1..21: mol_type = other RNA
gtaagtgaagcccagggcctc

SEQ ID NO: 33892 - RNA, 21 nt, synthetic construct
  source 1..21: mol_type = other RNA
gtagagtttgtcagccagaga

SEQ ID NO: 33893 - RNA, 21 nt, synthetic construct
  source 1..21: mol_type = other RNA
gtagcttctcttcactgctgc

SEQ ID NO: 33894 - RNA, 21 nt, synthetic construct
  source 1..21: mol_type = other RNA
gtatttcctcagcgtctcggt

SEQ ID NO: 33895 - RNA, 21 nt, synthetic construct
  source 1..21: mol_type = other RNA
gtcagccagagacagcgggat

SEQ ID NO: 33896 - RNA, 21 nt, synthetic construct
  source 1..21: mol_type = other RNA
gtctcggtaagctccgagtag

SEQ ID NO: 33897 - RNA, 21 nt, synthetic construct
  source 1..21: mol_type = other RNA
gtctctggctgacaaactcta

SEQ ID NO: 33898 - RNA, 21 nt, synthetic construct
  source 1..21: mol_type = other RNA
gtgaagagaagctactgtgtt

SEQ ID NO: 33899 - RNA, 21 nt, synthetic construct
  source 1..21: mol_type = other RNA
gtgaagcccagggcctctccc

SEQ ID NO: 33900 - RNA, 21 nt, synthetic construct
  source 1..21: mol_type = other RNA
gtgagcgtgccgtatttcctc

SEQ ID NO: 33901 - RNA, 21 nt, synthetic construct
  source 1..21: mol_type = other RNA
gtgaggctgcagtgattgtga

SEQ ID NO: 33902 - RNA, 21 nt, synthetic construct
  source 1..21: mol_type = other RNA
gtgatccacgcaggtggttcg

SEQ ID NO: 33903 - RNA, 21 nt, synthetic construct
  source 1..21: mol_type = other RNA
gtgattctcatcctggtgtgg

SEQ ID NO: 33904 - RNA, 21 nt, synthetic construct
  source 1..21: mol_type = other RNA
gtgattgtgattctcatcctg

SEQ ID NO: 33905 - RNA, 21 nt, synthetic construct
  source 1..21: mol_type = other RNA
gtgccgtatttcctcagcgtc

SEQ ID NO: 33906 - RNA, 21 nt, synthetic construct
  source 1..21: mol_type = other RNA
gtgccttgaatgaagagtaag

SEQ ID NO: 33907 - RNA, 21 nt, synthetic construct
  source 1..21: mol_type = other RNA
gtgcgggagcgagctggccac

SEQ ID NO: 33908 - RNA, 21 nt, synthetic construct
  source 1..21: mol_type = other RNA
gtggatcaccattccatccca

SEQ ID NO: 33909 - RNA, 21 nt, synthetic construct
  source 1..21: mol_type = other RNA
gtggccagctcgctcccgcac

SEQ ID NO: 33910 - RNA, 21 nt, synthetic construct
  source 1..21: mol_type = other RNA
gtgggaaggaatcccgctgtc

SEQ ID NO: 33911 - RNA, 21 nt, synthetic construct
  source 1..21: mol_type = other RNA
gtggggggtgtttgggatgga

SEQ ID NO: 33912 - RNA, 21 nt, synthetic construct
  source 1..21: mol_type = other RNA
gtggttcgcagaagcagcagt

SEQ ID NO: 33913 - RNA, 21 nt, synthetic construct
  source 1..21: mol_type = other RNA
gtgtgccttgaatgaagagta

SEQ ID NO: 33914 - RNA, 21 nt, synthetic construct
  source 1..21: mol_type = other RNA
gtgtggccagctcgctcccgc

SEQ ID NO: 33915 - RNA, 21 nt, synthetic construct
  source 1..21: mol_type = other RNA
gtgtgggaaggaatcccgctg

SEQ ID NO: 33916 - RNA, 21 nt, synthetic construct
  source 1..21: mol_type = other RNA
gtgtttgggatggaatggtga

SEQ ID NO: 33917 - RNA, 21 nt, synthetic construct
  source 1..21: mol_type = other RNA
gtgtttggtgcgggagcgagc

SEQ ID NO: 33918 - RNA, 21 nt, synthetic construct
  source 1..21: mol_type = other RNA
gttcgcagaagcagcagtgaa

SEQ ID NO: 33919 - RNA, 21 nt, synthetic construct
  source 1..21: mol_type = other RNA
gtttgggatggaatggtgatc

SEQ ID NO: 33920 - RNA, 21 nt, synthetic construct
  source 1..21: mol_type = other RNA
gtttggtgcgggagcgagctg

SEQ ID NO: 33921 - RNA, 21 nt, synthetic construct
  source 1..21: mol_type = other RNA
gtttgtcagccagagacagcg

SEQ ID NO: 33922 - RNA, 21 nt, synthetic construct
  source 1..21: mol_type = other RNA
taagctccgagtagagtttgt

SEQ ID NO: 33923 - RNA, 21 nt, synthetic construct
  source 1..21: mol_type = other RNA
taagtgaagcccagggcctct

SEQ ID NO: 33924 - RNA, 21 nt, synthetic construct
  source 1..21: mol_type = other RNA
taccgagacgctgaggaaata

SEQ ID NO: 33925 - RNA, 21 nt, synthetic construct
  source 1..21: mol_type = other RNA
tacggcacgctcaccaatcgc

SEQ ID NO: 33926 - RNA, 21 nt, synthetic construct
  source 1..21: mol_type = other RNA
tactcggagcttaccgagacg

SEQ ID NO: 33927 - RNA, 21 nt, synthetic construct
  source 1..21: mol_type = other RNA
tactcttcattcaaggcacac

SEQ ID NO: 33928 - RNA, 21 nt, synthetic construct
  source 1..21: mol_type = other RNA
tactgtgtttggtgcgggagc

SEQ ID NO: 33929 - RNA, 21 nt, synthetic construct
  source 1..21: mol_type = other RNA
tagagtttgtcagccagagac

SEQ ID NO: 33930 - RNA, 21 nt, synthetic construct
  source 1..21: mol_type = other RNA
tagcttctcttcactgctgct

SEQ ID NO: 33931 - RNA, 21 nt, synthetic construct
  source 1..21: mol_type = other RNA
tatttcctcagcgtctcggta

SEQ ID NO: 33932 - RNA, 21 nt, synthetic construct
  source 1..21: mol_type = other RNA
tcaaggcacaccggcgattgg

SEQ ID NO: 33933 - RNA, 21 nt, synthetic construct
  source 1..21: mol_type = other RNA
tcacaatcactgcagcctcac

SEQ ID NO: 33934 - RNA, 21 nt, synthetic construct
  source 1..21: mol_type = other RNA
tcacaggtgtggccagctcgc

SEQ ID NO: 33935 - RNA, 21 nt, synthetic construct
  source 1..21: mol_type = other RNA
tcaccaatcgccggtgtgcct

SEQ ID NO: 33936 - RNA, 21 nt, synthetic construct
  source 1..21: mol_type = other RNA
tcaccattccatcccaaacac

SEQ ID NO: 33937 - RNA, 21 nt, synthetic construct
  source 1..21: mol_type = other RNA
tcactgcagcctcacaggtgt

SEQ ID NO: 33938 - RNA, 21 nt, synthetic construct
  source 1..21: mol_type = other RNA
tcactgctgcttctgcgaacc

SEQ ID NO: 33939 - RNA, 21 nt, synthetic construct
  source 1..21: mol_type = other RNA
tcacttactcttcattcaagg

SEQ ID NO: 33940 - RNA, 21 nt, synthetic construct
  source 1..21: mol_type = other RNA
tcagccagagacagcgggatt

SEQ ID NO: 33941 - RNA, 21 nt, synthetic construct
  source 1..21: mol_type = other RNA
tcagcgtctcggtaagctccg

SEQ ID NO: 33942 - RNA, 21 nt, synthetic construct
  source 1..21: mol_type = other RNA
tcatcctggtgtgggaaggaa

SEQ ID NO: 33943 - RNA, 21 nt, synthetic construct
  source 1..21: mol_type = other RNA
tcattcaaggcacaccggcga

SEQ ID NO: 33944 - RNA, 21 nt, synthetic construct
  source 1..21: mol_type = other RNA
tccacgcaggtggttcgcaga

SEQ ID NO: 33945 - RNA, 21 nt, synthetic construct
  source 1..21: mol_type = other RNA
tcccacaccaggatgagaatc

SEQ ID NO: 33946 - RNA, 21 nt, synthetic construct
  source 1..21: mol_type = other RNA
tcccgcaccaaacacagtagc

SEQ ID NO: 33947 - RNA, 21 nt, synthetic construct
  source 1..21: mol_type = other RNA
tcccgctgtctctggctgaca

SEQ ID NO: 33948 - RNA, 21 nt, synthetic construct
  source 1..21: mol_type = other RNA
tccgagtagagtttgtcagcc

SEQ ID NO: 33949 - RNA, 21 nt, synthetic construct
  source 1..21: mol_type = other RNA
tcctcagcgtctcggtaagct

SEQ ID NO: 33950 - RNA, 21 nt, synthetic construct
  source 1..21: mol_type = other RNA
tcctggtgtgggaaggaatcc

SEQ ID NO: 33951 - RNA, 21 nt, synthetic construct
  source 1..21: mol_type = other RNA
tccttcccacaccaggatgag

SEQ ID NO: 33952 - RNA, 21 nt, synthetic construct
  source 1..21: mol_type = other RNA
tcgcagaagcagcagtgaaga

SEQ ID NO: 33953 - RNA, 21 nt, synthetic construct
  source 1..21: mol_type = other RNA
tcgccggtgtgccttgaatga

SEQ ID NO: 33954 - RNA, 21 nt, synthetic construct
  source 1..21: mol_type = other RNA
tcgctcccgcaccaaacacag

SEQ ID NO: 33955 - RNA, 21 nt, synthetic construct
  source 1..21: mol_type = other RNA
tcggagcttaccgagacgctg

SEQ ID NO: 33956 - RNA, 21 nt, synthetic construct
  source 1..21: mol_type = other RNA
tcggtaagctccgagtagagt

SEQ ID NO: 33957 - RNA, 21 nt, synthetic construct
  source 1..21: mol_type = other RNA
tctactcggagcttaccgaga

SEQ ID NO: 33958 - RNA, 21 nt, synthetic construct
  source 1..21: mol_type = other RNA
tctcatcctggtgtgggaagg

SEQ ID NO: 33959 - RNA, 21 nt, synthetic construct
  source 1..21: mol_type = other RNA
tctcggtaagctccgagtaga

SEQ ID NO: 33960 - RNA, 21 nt, synthetic construct
  source 1..21: mol_type = other RNA
tctctggctgacaaactctac

SEQ ID NO: 33961 - RNA, 21 nt, synthetic construct
  source 1..21: mol_type = other RNA
tctcttcactgctgcttctgc

SEQ ID NO: 33962 - RNA, 21 nt, synthetic construct
  source 1..21: mol_type = other RNA
tctgcgaaccacctgcgtgga

SEQ ID NO: 33963 - RNA, 21 nt, synthetic construct
  source 1..21: mol_type = other RNA
tctggctgacaaactctactc

SEQ ID NO: 33964 - RNA, 21 nt, synthetic construct
  source 1..21: mol_type = other RNA
tcttcactgctgcttctgcga

SEQ ID NO: 33965 - RNA, 21 nt, synthetic construct
  source 1..21: mol_type = other RNA
tcttcattcaaggcacaccgg

SEQ ID NO: 33966 - RNA, 21 nt, synthetic construct
  source 1..21: mol_type = other RNA
tgaagagaagctactgtgttt

SEQ ID NO: 33967 - RNA, 21 nt, synthetic construct
  source 1..21: mol_type = other RNA
tgaagagtaagtgaagcccag

SEQ ID NO: 33968 - RNA, 21 nt, synthetic construct
  source 1..21: mol_type = other RNA
tgaagcccagggcctctcccc

SEQ ID NO: 33969 - RNA, 21 nt, synthetic construct
  source 1..21: mol_type = other RNA
tgaatgaagagtaagtgaagc

SEQ ID NO: 33970 - RNA, 21 nt, synthetic construct
  source 1..21: mol_type = other RNA
tgacaaactctactcggagct

SEQ ID NO: 33971 - RNA, 21 nt, synthetic construct
  source 1..21: mol_type = other RNA
tgagaatcacaatcactgcag

SEQ ID NO: 33972 - RNA, 21 nt, synthetic construct
  source 1..21: mol_type = other RNA
tgagcgtgccgtatttcctca

SEQ ID NO: 33973 - RNA, 21 nt, synthetic construct
  source 1..21: mol_type = other RNA
tgaggaaatacggcacgctca

SEQ ID NO: 33974 - RNA, 21 nt, synthetic construct
  source 1..21: mol_type = other RNA
tgaggctgcagtgattgtgat

SEQ ID NO: 33975 - RNA, 21 nt, synthetic construct
  source 1..21: mol_type = other RNA
tgatccacgcaggtggttcgc

SEQ ID NO: 33976 - RNA, 21 nt, synthetic construct
  source 1..21: mol_type = other RNA
tgattctcatcctggtgtggg

SEQ ID NO: 33977 - RNA, 21 nt, synthetic construct
  source 1..21: mol_type = other RNA
tgattgtgattctcatcctgg

SEQ ID NO: 33978 - RNA, 21 nt, synthetic construct
  source 1..21: mol_type = other RNA
tgcagcctcacaggtgtggcc

SEQ ID NO: 33979 - RNA, 21 nt, synthetic construct
  source 1..21: mol_type = other RNA
tgcagtgattgtgattctcat

SEQ ID NO: 33980 - RNA, 21 nt, synthetic construct
  source 1..21: mol_type = other RNA
tgccgtatttcctcagcgtct

SEQ ID NO: 33981 - RNA, 21 nt, synthetic construct
  source 1..21: mol_type = other RNA
tgccttgaatgaagagtaagt

SEQ ID NO: 33982 - RNA, 21 nt, synthetic construct
  source 1..21: mol_type = other RNA
tgcgaaccacctgcgtggatc

SEQ ID NO: 33983 - RNA, 21 nt, synthetic construct
  source 1..21: mol_type = other RNA
tgcgggagcgagctggccaca

SEQ ID NO: 33984 - RNA, 21 nt, synthetic construct
  source 1..21: mol_type = other RNA
tgcgtggatcaccattccatc

SEQ ID NO: 33985 - RNA, 21 nt, synthetic construct
  source 1..21: mol_type = other RNA
tgctgcttctgcgaaccacct

SEQ ID NO: 33986 - RNA, 21 nt, synthetic construct
  source 1..21: mol_type = other RNA
tgcttctgcgaaccacctgcg

SEQ ID NO: 33987 - RNA, 21 nt, synthetic construct
  source 1..21: mol_type = other RNA
tggaatggtgatccacgcagg

SEQ ID NO: 33988 - RNA, 21 nt, synthetic construct
  source 1..21: mol_type = other RNA
tggatcaccattccatcccaa

SEQ ID NO: 33989 - RNA, 21 nt, synthetic construct
  source 1..21: mol_type = other RNA
tggccacacctgtgaggctgc

SEQ ID NO: 33990 - RNA, 21 nt, synthetic construct
  source 1..21: mol_type = other RNA
tggccagctcgctcccgcacc

SEQ ID NO: 33991 - RNA, 21 nt, synthetic construct
  source 1..21: mol_type = other RNA
tggccgcaaagaggggagagg

SEQ ID NO: 33992 - RNA, 21 nt, synthetic construct
  source 1..21: mol_type = other RNA
tggctgacaaactctactcgg

SEQ ID NO: 33993 - RNA, 21 nt, synthetic construct
  source 1..21: mol_type = other RNA
tgggaaggaatcccgctgtct

SEQ ID NO: 33994 - RNA, 21 nt, synthetic construct
  source 1..21: mol_type = other RNA
tgggatggaatggtgatccac

SEQ ID NO: 33995 - RNA, 21 nt, synthetic construct
  source 1..21: mol_type = other RNA
tgggcttcacttactcttcat

SEQ ID NO: 33996 - RNA, 21 nt, synthetic construct
  source 1..21: mol_type = other RNA
tggggggtgtttgggatggaa

SEQ ID NO: 33997 - RNA, 21 nt, synthetic construct
  source 1..21: mol_type = other RNA
tggtgagcgtgccgtatttcc

SEQ ID NO: 33998 - RNA, 21 nt, synthetic construct
  source 1..21: mol_type = other RNA
tggtgatccacgcaggtggtt

SEQ ID NO: 33999 - RNA, 21 nt, synthetic construct
  source 1..21: mol_type = other RNA
tggtgcgggagcgagctggcc

SEQ ID NO: 34000 - RNA, 21 nt, synthetic construct
  source 1..21: mol_type = other RNA
tggtgtgggaaggaatcccgc

SEQ ID NO: 34001 - RNA, 21 nt, synthetic construct
  source 1..21: mol_type = other RNA
tggttcgcagaagcagcagtg

SEQ ID NO: 34002 - RNA, 21 nt, synthetic construct
  source 1..21: mol_type = other RNA
tgtcagccagagacagcggga

SEQ ID NO: 34003 - RNA, 21 nt, synthetic construct
  source 1..21: mol_type = other RNA
tgtctctggctgacaaactct

SEQ ID NO: 34004 - RNA, 21 nt, synthetic construct
  source 1..21: mol_type = other RNA
tgtgaggctgcagtgattgtg

SEQ ID NO: 34005 - RNA, 21 nt, synthetic construct
  source 1..21: mol_type = other RNA
tgtgattctcatcctggtgtg

SEQ ID NO: 34006 - RNA, 21 nt, synthetic construct
  source 1..21: mol_type = other RNA
tgtgccttgaatgaagagtaa

SEQ ID NO: 34007 - RNA, 21 nt, synthetic construct
  source 1..21: mol_type = other RNA
tgtggccagctcgctcccgca

SEQ ID NO: 34008 - RNA, 21 nt, synthetic construct
  source 1..21: mol_type = other RNA
tgtgggaaggaatcccgctgt

SEQ ID NO: 34009 - RNA, 21 nt, synthetic construct
  source 1..21: mol_type = other RNA
tgtgtttggtgcgggagcgag

SEQ ID NO: 34010 - RNA, 21 nt, synthetic construct
  source 1..21: mol_type = other RNA
tgtttgggatggaatggtgat

SEQ ID NO: 34011 - RNA, 21 nt, synthetic construct
  source 1..21: mol_type = other RNA
tgtttggtgcgggagcgagct

SEQ ID NO: 34012 - RNA, 21 nt, synthetic construct
  source 1..21: mol_type = other RNA
ttaccgagacgctgaggaaat

SEQ ID NO: 34013 - RNA, 21 nt, synthetic construct
  source 1..21: mol_type = other RNA
ttactcttcattcaaggcaca

SEQ ID NO: 34014 - RNA, 21 nt, synthetic construct
  source 1..21: mol_type = other RNA
ttcaaggcacaccggcgattg

SEQ ID NO: 34015 - RNA, 21 nt, synthetic construct
  source 1..21: mol_type = other RNA
ttcactgctgcttctgcgaac

SEQ ID NO: 34016 - RNA, 21 nt, synthetic construct
  source 1..21: mol_type = other RNA
ttcacttactcttcattcaag

SEQ ID NO: 34017 - RNA, 21 nt, synthetic construct
  source 1..21: mol_type = other RNA
ttcattcaaggcacaccggcg

SEQ ID NO: 34018 - RNA, 21 nt, synthetic construct
  source 1..21: mol_type = other RNA
ttcccacaccaggatgagaat

SEQ ID NO: 34019 - RNA, 21 nt, synthetic construct
  source 1..21: mol_type = other RNA
ttcctcagcgtctcggtaagc

SEQ ID NO: 34020 - RNA, 21 nt, synthetic construct
  source 1..21: mol_type = other RNA
ttccttcccacaccaggatga

SEQ ID NO: 34021 - RNA, 21 nt, synthetic construct
  source 1..21: mol_type = other RNA
ttcgcagaagcagcagtgaag

SEQ ID NO: 34022 - RNA, 21 nt, synthetic construct
  source 1..21: mol_type = other RNA
ttctcatcctggtgtgggaag

SEQ ID NO: 34023 - RNA, 21 nt, synthetic construct
  source 1..21: mol_type = other RNA
ttctcttcactgctgcttctg

SEQ ID NO: 34024 - RNA, 21 nt, synthetic construct
  source 1..21: mol_type = other RNA
ttctgcgaaccacctgcgtgg

SEQ ID NO: 34025 - RNA, 21 nt, synthetic construct
  source 1..21: mol_type = other RNA
ttgaatgaagagtaagtgaag

SEQ ID NO: 34026 - RNA, 21 nt, synthetic construct
  source 1..21: mol_type = other RNA
ttgggatggaatggtgatcca

SEQ ID NO: 34027 - RNA, 21 nt, synthetic construct
  source 1..21: mol_type = other RNA
ttggtgagcgtgccgtatttc

SEQ ID NO: 34028 - RNA, 21 nt, synthetic construct
  source 1..21: mol_type = other RNA
ttggtgcgggagcgagctggc

SEQ ID NO: 34029 - RNA, 21 nt, synthetic construct
  source 1..21: mol_type = other RNA
ttgtcagccagagacagcggg

SEQ ID NO: 34030 - RNA, 21 nt, synthetic construct
  source 1..21: mol_type = other RNA
ttgtgattctcatcctggtgt

SEQ ID NO: 34031 - RNA, 21 nt, synthetic construct
  source 1..21: mol_type = other RNA
tttcctcagcgtctcggtaag

SEQ ID NO: 34032 - RNA, 21 nt, synthetic construct
  source 1..21: mol_type = other RNA
tttgggatggaatggtgatcc

SEQ ID NO: 34033 - RNA, 21 nt, synthetic construct
  source 1..21: mol_type = other RNA
tttggtgcgggagcgagctgg

SEQ ID NO: 34034 - RNA, 21 nt, synthetic construct
  source 1..21: mol_type = other RNA
tttgtcagccagagacagcgg

SEQ ID NO: 34035 - RNA, 22 nt, synthetic construct
  source 1..22: mol_type = other RNA
aaacacagtagcttctcttcac

SEQ ID NO: 34036 - RNA, 22 nt, synthetic construct
  source 1..22: mol_type = other RNA
aaactctactcggagcttaccg

SEQ ID NO: 34037 - RNA, 22 nt, synthetic construct
  source 1..22: mol_type = other RNA
aaagaggggagaggccctgggc

SEQ ID NO: 34038 - RNA, 22 nt, synthetic construct
  source 1..22: mol_type = other RNA
aaatacggcacgctcaccaatc

SEQ ID NO: 34039 - RNA, 22 nt, synthetic construct
  source 1..22: mol_type = other RNA
aacacagtagcttctcttcact

SEQ ID NO: 34040 - RNA, 22 nt, synthetic construct
  source 1..22: mol_type = other RNA
aaccacctgcgtggatcaccat

SEQ ID NO: 34041 - RNA, 22 nt, synthetic construct
  source 1..22: mol_type = other RNA
aactctactcggagcttaccga

SEQ ID NO: 34042 - RNA, 22 nt, synthetic construct
  source 1..22: mol_type = other RNA
aagagaagctactgtgtttggt

SEQ ID NO: 34043 - RNA, 22 nt, synthetic construct
  source 1..22: mol_type = other RNA
aagaggggagaggccctgggct

SEQ ID NO: 34044 - RNA, 22 nt, synthetic construct
  source 1..22: mol_type = other RNA
aagagtaagtgaagcccagggc

SEQ ID NO: 34045 - RNA, 22 nt, synthetic construct
  source 1..22: mol_type = other RNA
aagcagcagtgaagagaagcta

SEQ ID NO: 34046 - RNA, 22 nt, synthetic construct
  source 1..22: mol_type = other RNA
aagcccagggcctctcccctct

SEQ ID NO: 34047 - RNA, 22 nt, synthetic construct
  source 1..22: mol_type = other RNA
aagctactgtgtttggtgcggg

SEQ ID NO: 34048 - RNA, 22 nt, synthetic construct
  source 1..22: mol_type = other RNA
aagctccgagtagagtttgtca

SEQ ID NO: 34049 - RNA, 22 nt, synthetic construct
  source 1..22: mol_type = other RNA
aaggaatcccgctgtctctggc

SEQ ID NO: 34050 - RNA, 22 nt, synthetic construct
  source 1..22: mol_type = other RNA
aaggcacaccggcgattggtga

SEQ ID NO: 34051 - RNA, 22 nt, synthetic construct
  source 1..22: mol_type = other RNA
aagtgaagcccagggcctctcc

SEQ ID NO: 34052 - RNA, 22 nt, synthetic construct
  source 1..22: mol_type = other RNA
aatacggcacgctcaccaatcg

SEQ ID NO: 34053 - RNA, 22 nt, synthetic construct
  source 1..22: mol_type = other RNA
aatcacaatcactgcagcctca

SEQ ID NO: 34054 - RNA, 22 nt, synthetic construct
  source 1..22: mol_type = other RNA
aatcactgcagcctcacaggtg

SEQ ID NO: 34055 - RNA, 22 nt, synthetic construct
  source 1..22: mol_type = other RNA
aatcccgctgtctctggctgac

SEQ ID NO: 34056 - RNA, 22 nt, synthetic construct
  source 1..22: mol_type = other RNA
aatcgccggtgtgccttgaatg

SEQ ID NO: 34057 - RNA, 22 nt, synthetic construct
  source 1..22: mol_type = other RNA
aatgaagagtaagtgaagccca

SEQ ID NO: 34058 - RNA, 22 nt, synthetic construct
  source 1..22: mol_type = other RNA
aatggtgatccacgcaggtggt

SEQ ID NO: 34059 - RNA, 22 nt, synthetic construct
  source 1..22: mol_type = other RNA
acaaactctactcggagcttac

SEQ ID NO: 34060 - RNA, 22 nt, synthetic construct
  source 1..22: mol_type = other RNA
acaatcactgcagcctcacagg

SEQ ID NO: 34061 - RNA, 22 nt, synthetic construct
  source 1..22: mol_type = other RNA
acacagtagcttctcttcactg

SEQ ID NO: 34062 - RNA, 22 nt, synthetic construct
  source 1..22: mol_type = other RNA
acaccaggatgagaatcacaat

SEQ ID NO: 34063 - RNA, 22 nt, synthetic construct
  source 1..22: mol_type = other RNA
acaccggcgattggtgagcgtg

SEQ ID NO: 34064 - RNA, 22 nt, synthetic construct
  source 1..22: mol_type = other RNA
acacctgtgaggctgcagtgat

SEQ ID NO: 34065 - RNA, 22 nt, synthetic construct
  source 1..22: mol_type = other RNA
acagcgggattccttcccacac

SEQ ID NO: 34066 - RNA, 22 nt, synthetic construct
  source 1..22: mol_type = other RNA
acaggtgtggccagctcgctcc

SEQ ID NO: 34067 - RNA, 22 nt, synthetic construct
  source 1..22: mol_type = other RNA
acagtagcttctcttcactgct

SEQ ID NO: 34068 - RNA, 22 nt, synthetic construct
  source 1..22: mol_type = other RNA
accaaacacagtagcttctctt

SEQ ID NO: 34069 - RNA, 22 nt, synthetic construct
  source 1..22: mol_type = other RNA
accaatcgccggtgtgccttga

SEQ ID NO: 34070 - RNA, 22 nt, synthetic construct
  source 1..22: mol_type = other RNA
accacctgcgtggatcaccatt

SEQ ID NO: 34071 - RNA, 22 nt, synthetic construct
  source 1..22: mol_type = other RNA
accaggatgagaatcacaatca

SEQ ID NO: 34072 - RNA, 22 nt, synthetic construct
  source 1..22: mol_type = other RNA
accgagacgctgaggaaatacg

SEQ ID NO: 34073 - RNA, 22 nt, synthetic construct
  source 1..22: mol_type = other RNA
accggcgattggtgagcgtgcc

SEQ ID NO: 34074 - RNA, 22 nt, synthetic construct
  source 1..22: mol_type = other RNA
acctgcgtggatcaccattcca

SEQ ID NO: 34075 - RNA, 22 nt, synthetic construct
  source 1..22: mol_type = other RNA
acctgtgaggctgcagtgattg

SEQ ID NO: 34076 - RNA, 22 nt, synthetic construct
  source 1..22: mol_type = other RNA
acgcaggtggttcgcagaagca

SEQ ID NO: 34077 - RNA, 22 nt, synthetic construct
  source 1..22: mol_type = other RNA
acgctcaccaatcgccggtgtg

SEQ ID NO: 34078 - RNA, 22 nt, synthetic construct
  source 1..22: mol_type = other RNA
acgctgaggaaatacggcacgc

SEQ ID NO: 34079 - RNA, 22 nt, synthetic construct
  source 1..22: mol_type = other RNA
acggcacgctcaccaatcgccg

SEQ ID NO: 34080 - RNA, 22 nt, synthetic construct
  source 1..22: mol_type = other RNA
actcggagcttaccgagacgct

SEQ ID NO: 34081 - RNA, 22 nt, synthetic construct
  source 1..22: mol_type = other RNA
actctactcggagcttaccgag

SEQ ID NO: 34082 - RNA, 22 nt, synthetic construct
  source 1..22: mol_type = other RNA
actcttcattcaaggcacaccg

SEQ ID NO: 34083 - RNA, 22 nt, synthetic construct
  source 1..22: mol_type = other RNA
actgcagcctcacaggtgtggc

SEQ ID NO: 34084 - RNA, 22 nt, synthetic construct
  source 1..22: mol_type = other RNA
actgctgcttctgcgaaccacc

SEQ ID NO: 34085 - RNA, 22 nt, synthetic construct
  source 1..22: mol_type = other RNA
actgtgtttggtgcgggagcga

SEQ ID NO: 34086 - RNA, 22 nt, synthetic construct
  source 1..22: mol_type = other RNA
acttactcttcattcaaggcac

SEQ ID NO: 34087 - RNA, 22 nt, synthetic construct
  source 1..22: mol_type = other RNA
agaagcagcagtgaagagaagc

SEQ ID NO: 34088 - RNA, 22 nt, synthetic construct
  source 1..22: mol_type = other RNA
agaagctactgtgtttggtgcg

SEQ ID NO: 34089 - RNA, 22 nt, synthetic construct
  source 1..22: mol_type = other RNA
agaatcacaatcactgcagcct

SEQ ID NO: 34090 - RNA, 22 nt, synthetic construct
  source 1..22: mol_type = other RNA
agacagcgggattccttcccac

SEQ ID NO: 34091 - RNA, 22 nt, synthetic construct
  source 1..22: mol_type = other RNA
agacgctgaggaaatacggcac

SEQ ID NO: 34092 - RNA, 22 nt, synthetic construct
  source 1..22: mol_type = other RNA
agagaagctactgtgtttggtg

SEQ ID NO: 34093 - RNA, 22 nt, synthetic construct
  source 1..22: mol_type = other RNA
agagacagcgggattccttccc

SEQ ID NO: 34094 - RNA, 22 nt, synthetic construct
  source 1..22: mol_type = other RNA
agaggccctgggcttcacttac

SEQ ID NO: 34095 - RNA, 22 nt, synthetic construct
  source 1..22: mol_type = other RNA
agaggggagaggccctgggctt

SEQ ID NO: 34096 - RNA, 22 nt, synthetic construct
  source 1..22: mol_type = other RNA
agagtaagtgaagcccagggcc

SEQ ID NO: 34097 - RNA, 22 nt, synthetic construct
  source 1..22: mol_type = other RNA
agagtttgtcagccagagacag

SEQ ID NO: 34098 - RNA, 22 nt, synthetic construct
  source 1..22: mol_type = other RNA
agcagcagtgaagagaagctac

SEQ ID NO: 34099 - RNA, 22 nt, synthetic construct
  source 1..22: mol_type = other RNA
agcagtgaagagaagctactgt

SEQ ID NO: 34100 - RNA, 22 nt, synthetic construct
  source 1..22: mol_type = other RNA
agccagagacagcgggattcct

SEQ ID NO: 34101 - RNA, 22 nt, synthetic construct
  source 1..22: mol_type = other RNA
agcccagggcctctcccctctt

SEQ ID NO: 34102 - RNA, 22 nt, synthetic construct
  source 1..22: mol_type = other RNA
agcctcacaggtgtggccagct

SEQ ID NO: 34103 - RNA, 22 nt, synthetic construct
  source 1..22: mol_type = other RNA
agcgagctggccacacctgtga

SEQ ID NO: 34104 - RNA, 22 nt, synthetic construct
  source 1..22: mol_type = other RNA
agcgggattccttcccacacca

SEQ ID NO: 34105 - RNA, 22 nt, synthetic construct
  source 1..22: mol_type = other RNA
agcgtctcggtaagctccgagt

SEQ ID NO: 34106 - RNA, 22 nt, synthetic construct
  source 1..22: mol_type = other RNA
agcgtgccgtatttcctcagcg

SEQ ID NO: 34107 - RNA, 22 nt, synthetic construct
  source 1..22: mol_type = other RNA
agctactgtgtttggtgcggga

SEQ ID NO: 34108 - RNA, 22 nt, synthetic construct
  source 1..22: mol_type = other RNA
agctccgagtagagtttgtcag

SEQ ID NO: 34109 - RNA, 22 nt, synthetic construct
  source 1..22: mol_type = other RNA
agctcgctcccgcaccaaacac

SEQ ID NO: 34110 - RNA, 22 nt, synthetic construct
  source 1..22: mol_type = other RNA
agctggccacacctgtgaggct

SEQ ID NO: 34111 - RNA, 22 nt, synthetic construct
  source 1..22: mol_type = other RNA
agcttaccgagacgctgaggaa

SEQ ID NO: 34112 - RNA, 22 nt, synthetic construct
  source 1..22: mol_type = other RNA
agcttctcttcactgctgcttc

SEQ ID NO: 34113 - RNA, 22 nt, synthetic construct
  source 1..22: mol_type = other RNA
aggaaatacggcacgctcacca

SEQ ID NO: 34114 - RNA, 22 nt, synthetic construct
  source 1..22: mol_type = other RNA
aggaatcccgctgtctctggct

SEQ ID NO: 34115 - RNA, 22 nt, synthetic construct
  source 1..22: mol_type = other RNA
aggatgagaatcacaatcactg

SEQ ID NO: 34116 - RNA, 22 nt, synthetic construct
  source 1..22: mol_type = other RNA
aggcacaccggcgattggtgag

SEQ ID NO: 34117 - RNA, 22 nt, synthetic construct
  source 1..22: mol_type = other RNA
aggccctgggcttcacttactc

SEQ ID NO: 34118 - RNA, 22 nt, synthetic construct
  source 1..22: mol_type = other RNA
aggctgcagtgattgtgattct

SEQ ID NO: 34119 - RNA, 22 nt, synthetic construct
  source 1..22: mol_type = other RNA
aggggagaggccctgggcttca

SEQ ID NO: 34120 - RNA, 22 nt, synthetic construct
  source 1..22: mol_type = other RNA
aggtggttcgcagaagcagcag

SEQ ID NO: 34121 - RNA, 22 nt, synthetic construct
  source 1..22: mol_type = other RNA
aggtgtggccagctcgctcccg

SEQ ID NO: 34122 - RNA, 22 nt, synthetic construct
  source 1..22: mol_type = other RNA
agtaagtgaagcccagggcctc

SEQ ID NO: 34123 - RNA, 22 nt, synthetic construct
  source 1..22: mol_type = other RNA
agtagagtttgtcagccagaga

SEQ ID NO: 34124 - RNA, 22 nt, synthetic construct
  source 1..22: mol_type = other RNA
agtagcttctcttcactgctgc

SEQ ID NO: 34125 - RNA, 22 nt, synthetic construct
  source 1..22: mol_type = other RNA
agtgaagagaagctactgtgtt

SEQ ID NO: 34126 - RNA, 22 nt, synthetic construct
  source 1..22: mol_type = other RNA
agtgaagcccagggcctctccc

SEQ ID NO: 34127 - RNA, 22 nt, synthetic construct
  source 1..22: mol_type = other RNA
agtgattgtgattctcatcctg

SEQ ID NO: 34128 - RNA, 22 nt, synthetic construct
  source 1..22: mol_type = other RNA
agtttgtcagccagagacagcg

SEQ ID NO: 34129 - RNA, 22 nt, synthetic construct
  source 1..22: mol_type = other RNA
atacggcacgctcaccaatcgc

SEQ ID NO: 34130 - RNA, 22 nt, synthetic construct
  source 1..22: mol_type = other RNA
atcacaatcactgcagcctcac

SEQ ID NO: 34131 - RNA, 22 nt, synthetic construct
  source 1..22: mol_type = other RNA
atcaccattccatcccaaacac

SEQ ID NO: 34132 - RNA, 22 nt, synthetic construct
  source 1..22: mol_type = other RNA
atcactgcagcctcacaggtgt

SEQ ID NO: 34133 - RNA, 22 nt, synthetic construct
  source 1..22: mol_type = other RNA
atccacgcaggtggttcgcaga

SEQ ID NO: 34134 - RNA, 22 nt, synthetic construct
  source 1..22: mol_type = other RNA
atcccgctgtctctggctgaca

SEQ ID NO: 34135 - RNA, 22 nt, synthetic construct
  source 1..22: mol_type = other RNA
atcctggtgtgggaaggaatcc

SEQ ID NO: 34136 - RNA, 22 nt, synthetic construct
  source 1..22: mol_type = other RNA
atcgccggtgtgccttgaatga

SEQ ID NO: 34137 - RNA, 22 nt, synthetic construct
  source 1..22: mol_type = other RNA
atgaagagtaagtgaagcccag

SEQ ID NO: 34138 - RNA, 22 nt, synthetic construct
  source 1..22: mol_type = other RNA
atgagaatcacaatcactgcag

SEQ ID NO: 34139 - RNA, 22 nt, synthetic construct
  source 1..22: mol_type = other RNA
atggaatggtgatccacgcagg

SEQ ID NO: 34140 - RNA, 22 nt, synthetic construct
  source 1..22: mol_type = other RNA
atggtgatccacgcaggtggtt

SEQ ID NO: 34141 - RNA, 22 nt, synthetic construct
  source 1..22: mol_type = other RNA
attcaaggcacaccggcgattg

SEQ ID NO: 34142 - RNA, 22 nt, synthetic construct
  source 1..22: mol_type = other RNA
attccttcccacaccaggatga

SEQ ID NO: 34143 - RNA, 22 nt, synthetic construct
  source 1..22: mol_type = other RNA
attctcatcctggtgtgggaag

SEQ ID NO: 34144 - RNA, 22 nt, synthetic construct
  source 1..22: mol_type = other RNA
attggtgagcgtgccgtatttc

SEQ ID NO: 34145 - RNA, 22 nt, synthetic construct
  source 1..22: mol_type = other RNA
attgtgattctcatcctggtgt

SEQ ID NO: 34146 - RNA, 22 nt, synthetic construct
  source 1..22: mol_type = other RNA
atttcctcagcgtctcggtaag

SEQ ID NO: 34147 - RNA, 22 nt, synthetic construct
  source 1..22: mol_type = other RNA
caaacacagtagcttctcttca

SEQ ID NO: 34148 - RNA, 22 nt, synthetic construct
  source 1..22: mol_type = other RNA
caaactctactcggagcttacc

SEQ ID NO: 34149 - RNA, 22 nt, synthetic construct
  source 1..22: mol_type = other RNA
caaagaggggagaggccctggg

SEQ ID NO: 34150 - RNA, 22 nt, synthetic construct
  source 1..22: mol_type = other RNA
caaggcacaccggcgattggtg

SEQ ID NO: 34151 - RNA, 22 nt, synthetic construct
  source 1..22: mol_type = other RNA
caatcactgcagcctcacaggt

SEQ ID NO: 34152 - RNA, 22 nt, synthetic construct
  source 1..22: mol_type = other RNA
caatcgccggtgtgccttgaat

SEQ ID NO: 34153 - RNA, 22 nt, synthetic construct
  source 1..22: mol_type = other RNA
cacaatcactgcagcctcacag

SEQ ID NO: 34154 - RNA, 22 nt, synthetic construct
  source 1..22: mol_type = other RNA
cacaccaggatgagaatcacaa

SEQ ID NO: 34155 - RNA, 22 nt, synthetic construct
  source 1..22: mol_type = other RNA
cacaccggcgattggtgagcgt

SEQ ID NO: 34156 - RNA, 22 nt, synthetic construct
  source 1..22: mol_type = other RNA
cacacctgtgaggctgcagtga

SEQ ID NO: 34157 - RNA, 22 nt, synthetic construct
  source 1..22: mol_type = other RNA
cacaggtgtggccagctcgctc

SEQ ID NO: 34158 - RNA, 22 nt, synthetic construct
  source 1..22: mol_type = other RNA
cacagtagcttctcttcactgc

SEQ ID NO: 34159 - RNA, 22 nt, synthetic construct
  source 1..22: mol_type = other RNA
caccaaacacagtagcttctct

SEQ ID NO: 34160 - RNA, 22 nt, synthetic construct
  source 1..22: mol_type = other RNA
caccaatcgccggtgtgccttg

SEQ ID NO: 34161 - RNA, 22 nt, synthetic construct
  source 1..22: mol_type = other RNA
caccaggatgagaatcacaatc

SEQ ID NO: 34162 - RNA, 22 nt, synthetic construct
  source 1..22: mol_type = other RNA
caccggcgattggtgagcgtgc

SEQ ID NO: 34163 - RNA, 22 nt, synthetic construct
  source 1..22: mol_type = other RNA
cacctgcgtggatcaccattcc

SEQ ID NO: 34164 - RNA, 22 nt, synthetic construct
  source 1..22: mol_type = other RNA
cacctgtgaggctgcagtgatt

SEQ ID NO: 34165 - RNA, 22 nt, synthetic construct
  source 1..22: mol_type = other RNA
cacgcaggtggttcgcagaagc

SEQ ID NO: 34166 - RNA, 22 nt, synthetic construct
  source 1..22: mol_type = other RNA
cacgctcaccaatcgccggtgt

SEQ ID NO: 34167 - RNA, 22 nt, synthetic construct
  source 1..22: mol_type = other RNA
cactgcagcctcacaggtgtgg

SEQ ID NO: 34168 - RNA, 22 nt, synthetic construct
  source 1..22: mol_type = other RNA
cactgctgcttctgcgaaccac

SEQ ID NO: 34169 - RNA, 22 nt, synthetic construct
  source 1..22: mol_type = other RNA
cacttactcttcattcaaggca

SEQ ID NO: 34170 - RNA, 22 nt, synthetic construct
  source 1..22: mol_type = other RNA
cagaagcagcagtgaagagaag

SEQ ID NO: 34171 - RNA, 22 nt, synthetic construct
  source 1..22: mol_type = other RNA
cagagacagcgggattccttcc

SEQ ID NO: 34172 - RNA, 22 nt, synthetic construct
  source 1..22: mol_type = other RNA
cagcagtgaagagaagctactg

SEQ ID NO: 34173 - RNA, 22 nt, synthetic construct
  source 1..22: mol_type = other RNA
cagccagagacagcgggattcc

SEQ ID NO: 34174 - RNA, 22 nt, synthetic construct
  source 1..22: mol_type = other RNA
cagcctcacaggtgtggccagc

SEQ ID NO: 34175 - RNA, 22 nt, synthetic construct
  source 1..22: mol_type = other RNA
cagcgggattccttcccacacc

SEQ ID NO: 34176 - RNA, 22 nt, synthetic construct
  source 1..22: mol_type = other RNA
cagcgtctcggtaagctccgag

SEQ ID NO: 34177 - RNA, 22 nt, synthetic construct
  source 1..22: mol_type = other RNA
cagctcgctcccgcaccaaaca

SEQ ID NO: 34178 - RNA, 22 nt, synthetic construct
  source 1..22: mol_type = other RNA
caggatgagaatcacaatcact

SEQ ID NO: 34179 - RNA, 22 nt, synthetic construct
  source 1..22: mol_type = other RNA
caggtggttcgcagaagcagca

SEQ ID NO: 34180 - RNA, 22 nt, synthetic construct
  source 1..22: mol_type = other RNA
caggtgtggccagctcgctccc

SEQ ID NO: 34181 - RNA, 22 nt, synthetic construct
  source 1..22: mol_type = other RNA
cagtagcttctcttcactgctg

SEQ ID NO: 34182 - RNA, 22 nt, synthetic construct
  source 1..22: mol_type = other RNA
cagtgaagagaagctactgtgt

SEQ ID NO: 34183 - RNA, 22 nt, synthetic construct
  source 1..22: mol_type = other RNA
cagtgattgtgattctcatcct

SEQ ID NO: 34184 - RNA, 22 nt, synthetic construct
  source 1..22: mol_type = other RNA
catcctggtgtgggaaggaatc

SEQ ID NO: 34185 - RNA, 22 nt, synthetic construct
  source 1..22: mol_type = other RNA
cattcaaggcacaccggcgatt

SEQ ID NO: 34186 - RNA, 22 nt, synthetic construct
  source 1..22: mol_type = other RNA
ccaaacacagtagcttctcttc

SEQ ID NO: 34187 - RNA, 22 nt, synthetic construct
  source 1..22: mol_type = other RNA
ccaatcgccggtgtgccttgaa

SEQ ID NO: 34188 - RNA, 22 nt, synthetic construct
  source 1..22: mol_type = other RNA
ccacaccaggatgagaatcaca

SEQ ID NO: 34189 - RNA, 22 nt, synthetic construct
  source 1..22: mol_type = other RNA
ccacacctgtgaggctgcagtg

SEQ ID NO: 34190 - RNA, 22 nt, synthetic construct
  source 1..22: mol_type = other RNA
ccacctgcgtggatcaccattc

SEQ ID NO: 34191 - RNA, 22 nt, synthetic construct
  source 1..22: mol_type = other RNA
ccacgcaggtggttcgcagaag

SEQ ID NO: 34192 - RNA, 22 nt, synthetic construct
  source 1..22: mol_type = other RNA
ccagagacagcgggattccttc

SEQ ID NO: 34193 - RNA, 22 nt, synthetic construct
  source 1..22: mol_type = other RNA
ccagctcgctcccgcaccaaac

SEQ ID NO: 34194 - RNA, 22 nt, synthetic construct
  source 1..22: mol_type = other RNA
ccaggatgagaatcacaatcac

SEQ ID NO: 34195 - RNA, 22 nt, synthetic construct
  source 1..22: mol_type = other RNA
cccacaccaggatgagaatcac

SEQ ID NO: 34196 - RNA, 22 nt, synthetic construct
  source 1..22: mol_type = other RNA
cccgcaccaaacacagtagctt

SEQ ID NO: 34197 - RNA, 22 nt, synthetic construct
  source 1..22: mol_type = other RNA
cccgctgtctctggctgacaaa

SEQ ID NO: 34198 - RNA, 22 nt, synthetic construct
  source 1..22: mol_type = other RNA
ccctgggcttcacttactcttc

SEQ ID NO: 34199 - RNA, 22 nt, synthetic construct
  source 1..22: mol_type = other RNA
ccgagacgctgaggaaatacgg

SEQ ID NO: 34200 - RNA, 22 nt, synthetic construct
  source 1..22: mol_type = other RNA
ccgagtagagtttgtcagccag

SEQ ID NO: 34201 - RNA, 22 nt, synthetic construct
  source 1..22: mol_type = other RNA
ccgcaaagaggggagaggccct

SEQ ID NO: 34202 - RNA, 22 nt, synthetic construct
  source 1..22: mol_type = other RNA
ccgcaccaaacacagtagcttc

SEQ ID NO: 34203 - RNA, 22 nt, synthetic construct
  source 1..22: mol_type = other RNA
ccgctgtctctggctgacaaac

SEQ ID NO: 34204 - RNA, 22 nt, synthetic construct
  source 1..22: mol_type = other RNA
ccggcgattggtgagcgtgccg

SEQ ID NO: 34205 - RNA, 22 nt, synthetic construct
  source 1..22: mol_type = other RNA
ccggtgtgccttgaatgaagag

SEQ ID NO: 34206 - RNA, 22 nt, synthetic construct
  source 1..22: mol_type = other RNA
ccgtatttcctcagcgtctcgg

SEQ ID NO: 34207 - RNA, 22 nt, synthetic construct
  source 1..22: mol_type = other RNA
cctcacaggtgtggccagctcg

SEQ ID NO: 34208 - RNA, 22 nt, synthetic construct
  source 1..22: mol_type = other RNA
cctcagcgtctcggtaagctcc

SEQ ID NO: 34209 - RNA, 22 nt, synthetic construct
  source 1..22: mol_type = other RNA
cctgcgtggatcaccattccat

SEQ ID NO: 34210 - RNA, 22 nt, synthetic construct
  source 1..22: mol_type = other RNA
cctgggcttcacttactcttca

SEQ ID NO: 34211 - RNA, 22 nt, synthetic construct
  source 1..22: mol_type = other RNA
cctggtgtgggaaggaatcccg

SEQ ID NO: 34212 - RNA, 22 nt, synthetic construct
  source 1..22: mol_type = other RNA
cctgtgaggctgcagtgattgt

SEQ ID NO: 34213 - RNA, 22 nt, synthetic construct
  source 1..22: mol_type = other RNA
ccttcccacaccaggatgagaa

SEQ ID NO: 34214 - RNA, 22 nt, synthetic construct
  source 1..22: mol_type = other RNA
ccttgaatgaagagtaagtgaa

SEQ ID NO: 34215 - RNA, 22 nt, synthetic construct
  source 1..22: mol_type = other RNA
cgaaccacctgcgtggatcacc

SEQ ID NO: 34216 - RNA, 22 nt, synthetic construct
  source 1..22: mol_type = other RNA
cgagacgctgaggaaatacggc

SEQ ID NO: 34217 - RNA, 22 nt, synthetic construct
  source 1..22: mol_type = other RNA
cgagctggccacacctgtgagg

SEQ ID NO: 34218 - RNA, 22 nt, synthetic construct
  source 1..22: mol_type = other RNA
cgagtagagtttgtcagccaga

SEQ ID NO: 34219 - RNA, 22 nt, synthetic construct
  source 1..22: mol_type = other RNA
cgattggtgagcgtgccgtatt

SEQ ID NO: 34220 - RNA, 22 nt, synthetic construct
  source 1..22: mol_type = other RNA
cgcaaagaggggagaggccctg

SEQ ID NO: 34221 - RNA, 22 nt, synthetic construct
  source 1..22: mol_type = other RNA
cgcaccaaacacagtagcttct

SEQ ID NO: 34222 - RNA, 22 nt, synthetic construct
  source 1..22: mol_type = other RNA
cgcagaagcagcagtgaagaga

SEQ ID NO: 34223 - RNA, 22 nt, synthetic construct
  source 1..22: mol_type = other RNA
cgcaggtggttcgcagaagcag

SEQ ID NO: 34224 - RNA, 22 nt, synthetic construct
  source 1..22: mol_type = other RNA
cgccggtgtgccttgaatgaag

SEQ ID NO: 34225 - RNA, 22 nt, synthetic construct
  source 1..22: mol_type = other RNA
cgctcaccaatcgccggtgtgc

SEQ ID NO: 34226 - RNA, 22 nt, synthetic construct
  source 1..22: mol_type = other RNA
cgctcccgcaccaaacacagta

SEQ ID NO: 34227 - RNA, 22 nt, synthetic construct
  source 1..22: mol_type = other RNA
cgctgaggaaatacggcacgct

SEQ ID NO: 34228 - RNA, 22 nt, synthetic construct
  source 1..22: mol_type = other RNA
cgctgtctctggctgacaaact

SEQ ID NO: 34229 - RNA, 22 nt, synthetic construct
  source 1..22: mol_type = other RNA
cggagcttaccgagacgctgag

SEQ ID NO: 34230 - RNA, 22 nt, synthetic construct
  source 1..22: mol_type = other RNA
cggcacgctcaccaatcgccgg

SEQ ID NO: 34231 - RNA, 22 nt, synthetic construct
  source 1..22: mol_type = other RNA
cggcgattggtgagcgtgccgt

SEQ ID NO: 34232 - RNA, 22 nt, synthetic construct
  source 1..22: mol_type = other RNA
cgggagcgagctggccacacct

SEQ ID NO: 34233 - RNA, 22 nt, synthetic construct
  source 1..22: mol_type = other RNA
cgggattccttcccacaccagg

SEQ ID NO: 34234 - RNA, 22 nt, synthetic construct
  source 1..22: mol_type = other RNA
cggtaagctccgagtagagttt

SEQ ID NO: 34235 - RNA, 22 nt, synthetic construct
  source 1..22: mol_type = other RNA
cggtgtgccttgaatgaagagt

SEQ ID NO: 34236 - RNA, 22 nt, synthetic construct
  source 1..22: mol_type = other RNA
cgtatttcctcagcgtctcggt

SEQ ID NO: 34237 - RNA, 22 nt, synthetic construct
  source 1..22: mol_type = other RNA
cgtctcggtaagctccgagtag

SEQ ID NO: 34238 - RNA, 22 nt, synthetic construct
  source 1..22: mol_type = other RNA
cgtgccgtatttcctcagcgtc

SEQ ID NO: 34239 - RNA, 22 nt, synthetic construct
  source 1..22: mol_type = other RNA
cgtggatcaccattccatccca

SEQ ID NO: 34240 - RNA, 22 nt, synthetic construct
  source 1..22: mol_type = other RNA
ctactcggagcttaccgagacg

SEQ ID NO: 34241 - RNA, 22 nt, synthetic construct
  source 1..22: mol_type = other RNA
ctactgtgtttggtgcgggagc

SEQ ID NO: 34242 - RNA, 22 nt, synthetic construct
  source 1..22: mol_type = other RNA
ctcacaggtgtggccagctcgc

SEQ ID NO: 34243 - RNA, 22 nt, synthetic construct
  source 1..22: mol_type = other RNA
ctcaccaatcgccggtgtgcct

SEQ ID NO: 34244 - RNA, 22 nt, synthetic construct
  source 1..22: mol_type = other RNA
ctcagcgtctcggtaagctccg

SEQ ID NO: 34245 - RNA, 22 nt, synthetic construct
  source 1..22: mol_type = other RNA
ctcatcctggtgtgggaaggaa

SEQ ID NO: 34246 - RNA, 22 nt, synthetic construct
  source 1..22: mol_type = other RNA
ctcccgcaccaaacacagtagc

SEQ ID NO: 34247 - RNA, 22 nt, synthetic construct
  source 1..22: mol_type = other RNA
ctccgagtagagtttgtcagcc

SEQ ID NO: 34248 - RNA, 22 nt, synthetic construct
  source 1..22: mol_type = other RNA
ctcgctcccgcaccaaacacag

SEQ ID NO: 34249 - RNA, 22 nt, synthetic construct
  source 1..22: mol_type = other RNA
ctcggagcttaccgagacgctg

SEQ ID NO: 34250 - RNA, 22 nt, synthetic construct
  source 1..22: mol_type = other RNA
ctcggtaagctccgagtagagt

SEQ ID NO: 34251 - RNA, 22 nt, synthetic construct
  source 1..22: mol_type = other RNA
ctctactcggagcttaccgaga

SEQ ID NO: 34252 - RNA, 22 nt, synthetic construct
  source 1..22: mol_type = other RNA
ctctggctgacaaactctactc

SEQ ID NO: 34253 - RNA, 22 nt, synthetic construct
  source 1..22: mol_type = other RNA
ctcttcactgctgcttctgcga

SEQ ID NO: 34254 - RNA, 22 nt, synthetic construct
  source 1..22: mol_type = other RNA
ctcttcattcaaggcacaccgg

SEQ ID NO: 34255 - RNA, 22 nt, synthetic construct
  source 1..22: mol_type = other RNA
ctgacaaactctactcggagct

SEQ ID NO: 34256 - RNA, 22 nt, synthetic construct
  source 1..22: mol_type = other RNA
ctgaggaaatacggcacgctca

SEQ ID NO: 34257 - RNA, 22 nt, synthetic construct
  source 1..22: mol_type = other RNA
ctgcagcctcacaggtgtggcc

SEQ ID NO: 34258 - RNA, 22 nt, synthetic construct
  source 1..22: mol_type = other RNA
ctgcagtgattgtgattctcat

SEQ ID NO: 34259 - RNA, 22 nt, synthetic construct
  source 1..22: mol_type = other RNA
ctgcgaaccacctgcgtggatc

SEQ ID NO: 34260 - RNA, 22 nt, synthetic construct
  source 1..22: mol_type = other RNA
ctgcgtggatcaccattccatc

SEQ ID NO: 34261 - RNA, 22 nt, synthetic construct
  source 1..22: mol_type = other RNA
ctgctgcttctgcgaaccacct

SEQ ID NO: 34262 - RNA, 22 nt, synthetic construct
  source 1..22: mol_type = other RNA
ctgcttctgcgaaccacctgcg

SEQ ID NO: 34263 - RNA, 22 nt, synthetic construct
  source 1..22: mol_type = other RNA
ctggccacacctgtgaggctgc

SEQ ID NO: 34264 - RNA, 22 nt, synthetic construct
  source 1..22: mol_type = other RNA
ctggctgacaaactctactcgg

SEQ ID NO: 34265 - RNA, 22 nt, synthetic construct
  source 1..22: mol_type = other RNA
ctgggcttcacttactcttcat

SEQ ID NO: 34266 - RNA, 22 nt, synthetic construct
  source 1..22: mol_type = other RNA
ctggtgtgggaaggaatcccgc

SEQ ID NO: 34267 - RNA, 22 nt, synthetic construct
  source 1..22: mol_type = other RNA
ctgtctctggctgacaaactct

SEQ ID NO: 34268 - RNA, 22 nt, synthetic construct
  source 1..22: mol_type = other RNA
ctgtgaggctgcagtgattgtg

SEQ ID NO: 34269 - RNA, 22 nt, synthetic construct
  source 1..22: mol_type = other RNA
ctgtgtttggtgcgggagcgag

SEQ ID NO: 34270 - RNA, 22 nt, synthetic construct
  source 1..22: mol_type = other RNA
cttaccgagacgctgaggaaat

SEQ ID NO: 34271 - RNA, 22 nt, synthetic construct
  source 1..22: mol_type = other RNA
cttactcttcattcaaggcaca

SEQ ID NO: 34272 - RNA, 22 nt, synthetic construct
  source 1..22: mol_type = other RNA
cttcactgctgcttctgcgaac

SEQ ID NO: 34273 - RNA, 22 nt, synthetic construct
  source 1..22: mol_type = other RNA
cttcacttactcttcattcaag

SEQ ID NO: 34274 - RNA, 22 nt, synthetic construct
  source 1..22: mol_type = other RNA
cttcattcaaggcacaccggcg

SEQ ID NO: 34275 - RNA, 22 nt, synthetic construct
  source 1..22: mol_type = other RNA
cttcccacaccaggatgagaat

SEQ ID NO: 34276 - RNA, 22 nt, synthetic construct
  source 1..22: mol_type = other RNA
cttctcttcactgctgcttctg

SEQ ID NO: 34277 - RNA, 22 nt, synthetic construct
  source 1..22: mol_type = other RNA
cttctgcgaaccacctgcgtgg

SEQ ID NO: 34278 - RNA, 22 nt, synthetic construct
  source 1..22: mol_type = other RNA
cttgaatgaagagtaagtgaag

SEQ ID NO: 34279 - RNA, 22 nt, synthetic construct
  source 1..22: mol_type = other RNA
gaaatacggcacgctcaccaat

SEQ ID NO: 34280 - RNA, 22 nt, synthetic construct
  source 1..22: mol_type = other RNA
gaaccacctgcgtggatcacca

SEQ ID NO: 34281 - RNA, 22 nt, synthetic construct
  source 1..22: mol_type = other RNA
gaagagaagctactgtgtttgg

SEQ ID NO: 34282 - RNA, 22 nt, synthetic construct
  source 1..22: mol_type = other RNA
gaagagtaagtgaagcccaggg

SEQ ID NO: 34283 - RNA, 22 nt, synthetic construct
  source 1..22: mol_type = other RNA
gaagcagcagtgaagagaagct

SEQ ID NO: 34284 - RNA, 22 nt, synthetic construct
  source 1..22: mol_type = other RNA
gaagcccagggcctctcccctc

SEQ ID NO: 34285 - RNA, 22 nt, synthetic construct
  source 1..22: mol_type = other RNA
gaagctactgtgtttggtgcgg

SEQ ID NO: 34286 - RNA, 22 nt, synthetic construct
  source 1..22: mol_type = other RNA
gaaggaatcccgctgtctctgg

SEQ ID NO: 34287 - RNA, 22 nt, synthetic construct
  source 1..22: mol_type = other RNA
gaatcacaatcactgcagcctc

SEQ ID NO: 34288 - RNA, 22 nt, synthetic construct
  source 1..22: mol_type = other RNA
gaatcccgctgtctctggctga

SEQ ID NO: 34289 - RNA, 22 nt, synthetic construct
  source 1..22: mol_type = other RNA
gaatgaagagtaagtgaagccc

SEQ ID NO: 34290 - RNA, 22 nt, synthetic construct
  source 1..22: mol_type = other RNA
gaatggtgatccacgcaggtgg

SEQ ID NO: 34291 - RNA, 22 nt, synthetic construct
  source 1..22: mol_type = other RNA
gacaaactctactcggagctta

SEQ ID NO: 34292 - RNA, 22 nt, synthetic construct
  source 1..22: mol_type = other RNA
gacagcgggattccttcccaca

SEQ ID NO: 34293 - RNA, 22 nt, synthetic construct
  source 1..22: mol_type = other RNA
gacgctgaggaaatacggcacg

SEQ ID NO: 34294 - RNA, 22 nt, synthetic construct
  source 1..22: mol_type = other RNA
gagaagctactgtgtttggtgc

SEQ ID NO: 34295 - RNA, 22 nt, synthetic construct
  source 1..22: mol_type = other RNA
gagaatcacaatcactgcagcc

SEQ ID NO: 34296 - RNA, 22 nt, synthetic construct
  source 1..22: mol_type = other RNA
gagacagcgggattccttccca

SEQ ID NO: 34297 - RNA, 22 nt, synthetic construct
  source 1..22: mol_type = other RNA
gagacgctgaggaaatacggca

SEQ ID NO: 34298 - RNA, 22 nt, synthetic construct
  source 1..22: mol_type = other RNA
gagaggccctgggcttcactta

SEQ ID NO: 34299 - RNA, 22 nt, synthetic construct
  source 1..22: mol_type = other RNA
gagcgagctggccacacctgtg

SEQ ID NO: 34300 - RNA, 22 nt, synthetic construct
  source 1..22: mol_type = other RNA
gagcgtgccgtatttcctcagc

SEQ ID NO: 34301 - RNA, 22 nt, synthetic construct
  source 1..22: mol_type = other RNA
gagctggccacacctgtgaggc

SEQ ID NO: 34302 - RNA, 22 nt, synthetic construct
  source 1..22: mol_type = other RNA
gagcttaccgagacgctgagga

SEQ ID NO: 34303 - RNA, 22 nt, synthetic construct
  source 1..22: mol_type = other RNA
gaggaaatacggcacgctcacc

SEQ ID NO: 34304 - RNA, 22 nt, synthetic construct
  source 1..22: mol_type = other RNA
gaggccctgggcttcacttact

SEQ ID NO: 34305 - RNA, 22 nt, synthetic construct
  source 1..22: mol_type = other RNA
gaggctgcagtgattgtgattc

SEQ ID NO: 34306 - RNA, 22 nt, synthetic construct
  source 1..22: mol_type = other RNA
gaggggagaggccctgggcttc

SEQ ID NO: 34307 - RNA, 22 nt, synthetic construct
  source 1..22: mol_type = other RNA
gagtaagtgaagcccagggcct

SEQ ID NO: 34308 - RNA, 22 nt, synthetic construct
  source 1..22: mol_type = other RNA
gagtagagtttgtcagccagag

SEQ ID NO: 34309 - RNA, 22 nt, synthetic construct
  source 1..22: mol_type = other RNA
gagtttgtcagccagagacagc

SEQ ID NO: 34310 - RNA, 22 nt, synthetic construct
  source 1..22: mol_type = other RNA
gatcaccattccatcccaaaca

SEQ ID NO: 34311 - RNA, 22 nt, synthetic construct
  source 1..22: mol_type = other RNA
gatccacgcaggtggttcgcag

SEQ ID NO: 34312 - RNA, 22 nt, synthetic construct
  source 1..22: mol_type = other RNA
gatgagaatcacaatcactgca

SEQ ID NO: 34313 - RNA, 22 nt, synthetic construct
  source 1..22: mol_type = other RNA
gatggaatggtgatccacgcag

SEQ ID NO: 34314 - RNA, 22 nt, synthetic construct
  source 1..22: mol_type = other RNA
gattccttcccacaccaggatg

SEQ ID NO: 34315 - RNA, 22 nt, synthetic construct
  source 1..22: mol_type = other RNA
gattctcatcctggtgtgggaa

SEQ ID NO: 34316 - RNA, 22 nt, synthetic construct
  source 1..22: mol_type = other RNA
gattggtgagcgtgccgtattt

SEQ ID NO: 34317 - RNA, 22 nt, synthetic construct
  source 1..22: mol_type = other RNA
gattgtgattctcatcctggtg

SEQ ID NO: 34318 - RNA, 22 nt, synthetic construct
  source 1..22: mol_type = other RNA
gcaaagaggggagaggccctgg

SEQ ID NO: 34319 - RNA, 22 nt, synthetic construct
  source 1..22: mol_type = other RNA
gcacaccggcgattggtgagcg

SEQ ID NO: 34320 - RNA, 22 nt, synthetic construct
  source 1..22: mol_type = other RNA
gcaccaaacacagtagcttctc

SEQ ID NO: 34321 - RNA, 22 nt, synthetic construct
  source 1..22: mol_type = other RNA
gcacgctcaccaatcgccggtg

SEQ ID NO: 34322 - RNA, 22 nt, synthetic construct
  source 1..22: mol_type = other RNA
gcagaagcagcagtgaagagaa

SEQ ID NO: 34323 - RNA, 22 nt, synthetic construct
  source 1..22: mol_type = other RNA
gcagcagtgaagagaagctact

SEQ ID NO: 34324 - RNA, 22 nt, synthetic construct
  source 1..22: mol_type = other RNA
gcagcctcacaggtgtggccag

SEQ ID NO: 34325 - RNA, 22 nt, synthetic construct
  source 1..22: mol_type = other RNA
gcaggtggttcgcagaagcagc

SEQ ID NO: 34326 - RNA, 22 nt, synthetic construct
  source 1..22: mol_type = other RNA
gcagtgaagagaagctactgtg

SEQ ID NO: 34327 - RNA, 22 nt, synthetic construct
  source 1..22: mol_type = other RNA
gcagtgattgtgattctcatcc

SEQ ID NO: 34328 - RNA, 22 nt, synthetic construct
  source 1..22: mol_type = other RNA
gccacacctgtgaggctgcagt

SEQ ID NO: 34329 - RNA, 22 nt, synthetic construct
  source 1..22: mol_type = other RNA
gccagagacagcgggattcctt

SEQ ID NO: 34330 - RNA, 22 nt, synthetic construct
  source 1..22: mol_type = other RNA
gccagctcgctcccgcaccaaa

SEQ ID NO: 34331 - RNA, 22 nt, synthetic construct
  source 1..22: mol_type = other RNA
gccctgggcttcacttactctt

SEQ ID NO: 34332 - RNA, 22 nt, synthetic construct
  source 1..22: mol_type = other RNA
gccgcaaagaggggagaggccc

SEQ ID NO: 34333 - RNA, 22 nt, synthetic construct
  source 1..22: mol_type = other RNA
gccggtgtgccttgaatgaaga

SEQ ID NO: 34334 - RNA, 22 nt, synthetic construct
  source 1..22: mol_type = other RNA
gccgtatttcctcagcgtctcg

SEQ ID NO: 34335 - RNA, 22 nt, synthetic construct
  source 1..22: mol_type = other RNA
gcctcacaggtgtggccagctc

SEQ ID NO: 34336 - RNA, 22 nt, synthetic construct
  source 1..22: mol_type = other RNA
gccttgaatgaagagtaagtga

SEQ ID NO: 34337 - RNA, 22 nt, synthetic construct
  source 1..22: mol_type = other RNA
gcgaaccacctgcgtggatcac

SEQ ID NO: 34338 - RNA, 22 nt, synthetic construct
  source 1..22: mol_type = other RNA
gcgagctggccacacctgtgag

SEQ ID NO: 34339 - RNA, 22 nt, synthetic construct
  source 1..22: mol_type = other RNA
gcgattggtgagcgtgccgtat

SEQ ID NO: 34340 - RNA, 22 nt, synthetic construct
  source 1..22: mol_type = other RNA
gcgggagcgagctggccacacc

SEQ ID NO: 34341 - RNA, 22 nt, synthetic construct
  source 1..22: mol_type = other RNA
gcgggattccttcccacaccag

SEQ ID NO: 34342 - RNA, 22 nt, synthetic construct
  source 1..22: mol_type = other RNA
gcgtctcggtaagctccgagta

SEQ ID NO: 34343 - RNA, 22 nt, synthetic construct
  source 1..22: mol_type = other RNA
gcgtgccgtatttcctcagcgt

SEQ ID NO: 34344 - RNA, 22 nt, synthetic construct
  source 1..22: mol_type = other RNA
gcgtggatcaccattccatccc

SEQ ID NO: 34345 - RNA, 22 nt, synthetic construct
  source 1..22: mol_type = other RNA
gctactgtgtttggtgcgggag

SEQ ID NO: 34346 - RNA, 22 nt, synthetic construct
  source 1..22: mol_type = other RNA
gctcaccaatcgccggtgtgcc

SEQ ID NO: 34347 - RNA, 22 nt, synthetic construct
  source 1..22: mol_type = other RNA
gctcccgcaccaaacacagtag

SEQ ID NO: 34348 - RNA, 22 nt, synthetic construct
  source 1..22: mol_type = other RNA
gctccgagtagagtttgtcagc

SEQ ID NO: 34349 - RNA, 22 nt, synthetic construct
  source 1..22: mol_type = other RNA
gctcgctcccgcaccaaacaca

SEQ ID NO: 34350 - RNA, 22 nt, synthetic construct
  source 1..22: mol_type = other RNA
gctgacaaactctactcggagc

SEQ ID NO: 34351 - RNA, 22 nt, synthetic construct
  source 1..22: mol_type = other RNA
gctgaggaaatacggcacgctc

SEQ ID NO: 34352 - RNA, 22 nt, synthetic construct
  source 1..22: mol_type = other RNA
gctgcagtgattgtgattctca

SEQ ID NO: 34353 - RNA, 22 nt, synthetic construct
  source 1..22: mol_type = other RNA
gctgcttctgcgaaccacctgc

SEQ ID NO: 34354 - RNA, 22 nt, synthetic construct
  source 1..22: mol_type = other RNA
gctggccacacctgtgaggctg

SEQ ID NO: 34355 - RNA, 22 nt, synthetic construct
  source 1..22: mol_type = other RNA
gctgtctctggctgacaaactc

SEQ ID NO: 34356 - RNA, 22 nt, synthetic construct
  source 1..22: mol_type = other RNA
gcttaccgagacgctgaggaaa

SEQ ID NO: 34357 - RNA, 22 nt, synthetic construct
  source 1..22: mol_type = other RNA
gcttcacttactcttcattcaa

SEQ ID NO: 34358 - RNA, 22 nt, synthetic construct
  source 1..22: mol_type = other RNA
gcttctcttcactgctgcttct

SEQ ID NO: 34359 - RNA, 22 nt, synthetic construct
  source 1..22: mol_type = other RNA
gcttctgcgaaccacctgcgtg

SEQ ID NO: 34360 - RNA, 22 nt, synthetic construct
  source 1..22: mol_type = other RNA
ggaaatacggcacgctcaccaa

SEQ ID NO: 34361 - RNA, 22 nt, synthetic construct
  source 1..22: mol_type = other RNA
ggaaggaatcccgctgtctctg

SEQ ID NO: 34362 - RNA, 22 nt, synthetic construct
  source 1..22: mol_type = other RNA
ggaatcccgctgtctctggctg

SEQ ID NO: 34363 - RNA, 22 nt, synthetic construct
  source 1..22: mol_type = other RNA
ggaatggtgatccacgcaggtg

SEQ ID NO: 34364 - RNA, 22 nt, synthetic construct
  source 1..22: mol_type = other RNA
ggagaggccctgggcttcactt

SEQ ID NO: 34365 - RNA, 22 nt, synthetic construct
  source 1..22: mol_type = other RNA
ggagcgagctggccacacctgt

SEQ ID NO: 34366 - RNA, 22 nt, synthetic construct
  source 1..22: mol_type = other RNA
ggagcttaccgagacgctgagg

SEQ ID NO: 34367 - RNA, 22 nt, synthetic construct
  source 1..22: mol_type = other RNA
ggatcaccattccatcccaaac

SEQ ID NO: 34368 - RNA, 22 nt, synthetic construct
  source 1..22: mol_type = other RNA
ggatgagaatcacaatcactgc

SEQ ID NO: 34369 - RNA, 22 nt, synthetic construct
  source 1..22: mol_type = other RNA
ggatggaatggtgatccacgca

SEQ ID NO: 34370 - RNA, 22 nt, synthetic construct
  source 1..22: mol_type = other RNA
ggattccttcccacaccaggat

SEQ ID NO: 34371 - RNA, 22 nt, synthetic construct
  source 1..22: mol_type = other RNA
ggcacaccggcgattggtgagc

SEQ ID NO: 34372 - RNA, 22 nt, synthetic construct
  source 1..22: mol_type = other RNA
ggcacgctcaccaatcgccggt

SEQ ID NO: 34373 - RNA, 22 nt, synthetic construct
  source 1..22: mol_type = other RNA
ggccacacctgtgaggctgcag

SEQ ID NO: 34374 - RNA, 22 nt, synthetic construct
  source 1..22: mol_type = other RNA
ggccagctcgctcccgcaccaa

SEQ ID NO: 34375 - RNA, 22 nt, synthetic construct
  source 1..22: mol_type = other RNA
ggccctgggcttcacttactct

SEQ ID NO: 34376 - RNA, 22 nt, synthetic construct
  source 1..22: mol_type = other RNA
ggccgcaaagaggggagaggcc

SEQ ID NO: 34377 - RNA, 22 nt, synthetic construct
  source 1..22: mol_type = other RNA
ggcgattggtgagcgtgccgta

SEQ ID NO: 34378 - RNA, 22 nt, synthetic construct
  source 1..22: mol_type = other RNA
ggctgacaaactctactcggag

SEQ ID NO: 34379 - RNA, 22 nt, synthetic construct
  source 1..22: mol_type = other RNA
ggctgcagtgattgtgattctc

SEQ ID NO: 34380 - RNA, 22 nt, synthetic construct
  source 1..22: mol_type = other RNA
ggcttcacttactcttcattca

SEQ ID NO: 34381 - RNA, 22 nt, synthetic construct
  source 1..22: mol_type = other RNA
gggaaggaatcccgctgtctct

SEQ ID NO: 34382 - RNA, 22 nt, synthetic construct
  source 1..22: mol_type = other RNA
gggagaggccctgggcttcact

SEQ ID NO: 34383 - RNA, 22 nt, synthetic construct
  source 1..22: mol_type = other RNA
gggagcgagctggccacacctg

SEQ ID NO: 34384 - RNA, 22 nt, synthetic construct
  source 1..22: mol_type = other RNA
gggatggaatggtgatccacgc

SEQ ID NO: 34385 - RNA, 22 nt, synthetic construct
  source 1..22: mol_type = other RNA
gggattccttcccacaccagga

SEQ ID NO: 34386 - RNA, 22 nt, synthetic construct
  source 1..22: mol_type = other RNA
gggcttcacttactcttcattc

SEQ ID NO: 34387 - RNA, 22 nt, synthetic construct
  source 1..22: mol_type = other RNA
ggggagaggccctgggcttcac

SEQ ID NO: 34388 - RNA, 22 nt, synthetic construct
  source 1..22: mol_type = other RNA
ggggggtgtttgggatggaatg

SEQ ID NO: 34389 - RNA, 22 nt, synthetic construct
  source 1..22: mol_type = other RNA
gggggtgtttgggatggaatgg

SEQ ID NO: 34390 - RNA, 22 nt, synthetic construct
  source 1..22: mol_type = other RNA
ggggtgtttgggatggaatggt

SEQ ID NO: 34391 - RNA, 22 nt, synthetic construct
  source 1..22: mol_type = other RNA
gggtggggggtgtttgggatgg

SEQ ID NO: 34392 - RNA, 22 nt, synthetic construct
  source 1..22: mol_type = other RNA
gggtgtttgggatggaatggtg

SEQ ID NO: 34393 - RNA, 22 nt, synthetic construct
  source 1..22: mol_type = other RNA
ggtaagctccgagtagagtttg

SEQ ID NO: 34394 - RNA, 22 nt, synthetic construct
  source 1..22: mol_type = other RNA
ggtgagcgtgccgtatttcctc

SEQ ID NO: 34395 - RNA, 22 nt, synthetic construct
  source 1..22: mol_type = other RNA
ggtgatccacgcaggtggttcg

SEQ ID NO: 34396 - RNA, 22 nt, synthetic construct
  source 1..22: mol_type = other RNA
ggtgcgggagcgagctggccac

SEQ ID NO: 34397 - RNA, 22 nt, synthetic construct
  source 1..22: mol_type = other RNA
ggtggggggtgtttgggatgga

SEQ ID NO: 34398 - RNA, 22 nt, synthetic construct
  source 1..22: mol_type = other RNA
ggtggttcgcagaagcagcagt

SEQ ID NO: 34399 - RNA, 22 nt, synthetic construct
  source 1..22: mol_type = other RNA
ggtgtgccttgaatgaagagta

SEQ ID NO: 34400 - RNA, 22 nt, synthetic construct
  source 1..22: mol_type = other RNA
ggtgtggccagctcgctcccgc

SEQ ID NO: 34401 - RNA, 22 nt, synthetic construct
  source 1..22: mol_type = other RNA
ggtgtgggaaggaatcccgctg

SEQ ID NO: 34402 - RNA, 22 nt, synthetic construct
  source 1..22: mol_type = other RNA
ggtgtttgggatggaatggtga

SEQ ID NO: 34403 - RNA, 22 nt, synthetic construct
  source 1..22: mol_type = other RNA
ggttcgcagaagcagcagtgaa

SEQ ID NO: 34404 - RNA, 22 nt, synthetic construct
  source 1..22: mol_type = other RNA
gtaagctccgagtagagtttgt

SEQ ID NO: 34405 - RNA, 22 nt, synthetic construct
  source 1..22: mol_type = other RNA
gtaagtgaagcccagggcctct

SEQ ID NO: 34406 - RNA, 22 nt, synthetic construct
  source 1..22: mol_type = other RNA
gtagagtttgtcagccagagac

SEQ ID NO: 34407 - RNA, 22 nt, synthetic construct
  source 1..22: mol_type = other RNA
gtagcttctcttcactgctgct

SEQ ID NO: 34408 - RNA, 22 nt, synthetic construct
  source 1..22: mol_type = other RNA
gtatttcctcagcgtctcggta

SEQ ID NO: 34409 - RNA, 22 nt, synthetic construct
  source 1..22: mol_type = other RNA
gtcagccagagacagcgggatt

SEQ ID NO: 34410 - RNA, 22 nt, synthetic construct
  source 1..22: mol_type = other RNA
gtctcggtaagctccgagtaga

SEQ ID NO: 34411 - RNA, 22 nt, synthetic construct
  source 1..22: mol_type = other RNA
gtctctggctgacaaactctac

SEQ ID NO: 34412 - RNA, 22 nt, synthetic construct
  source 1..22: mol_type = other RNA
gtgaagagaagctactgtgttt

SEQ ID NO: 34413 - RNA, 22 nt, synthetic construct
  source 1..22: mol_type = other RNA
gtgaagcccagggcctctcccc

SEQ ID NO: 34414 - RNA, 22 nt, synthetic construct
  source 1..22: mol_type = other RNA
gtgagcgtgccgtatttcctca

SEQ ID NO: 34415 - RNA, 22 nt, synthetic construct
  source 1..22: mol_type = other RNA
gtgaggctgcagtgattgtgat

SEQ ID NO: 34416 - RNA, 22 nt, synthetic construct
  source 1..22: mol_type = other RNA
gtgatccacgcaggtggttcgc

SEQ ID NO: 34417 - RNA, 22 nt, synthetic construct
  source 1..22: mol_type = other RNA
gtgattctcatcctggtgtggg

SEQ ID NO: 34418 - RNA, 22 nt, synthetic construct
  source 1..22: mol_type = other RNA
gtgattgtgattctcatcctgg

SEQ ID NO: 34419 - RNA, 22 nt, synthetic construct
  source 1..22: mol_type = other RNA
gtgccgtatttcctcagcgtct

SEQ ID NO: 34420 - RNA, 22 nt, synthetic construct
  source 1..22: mol_type = other RNA
gtgccttgaatgaagagtaagt

SEQ ID NO: 34421 - RNA, 22 nt, synthetic construct
  source 1..22: mol_type = other RNA
gtgcgggagcgagctggccaca

SEQ ID NO: 34422 - RNA, 22 nt, synthetic construct
  source 1..22: mol_type = other RNA
gtggatcaccattccatcccaa

SEQ ID NO: 34423 - RNA, 22 nt, synthetic construct
  source 1..22: mol_type = other RNA
gtggccagctcgctcccgcacc

SEQ ID NO: 34424 - RNA, 22 nt, synthetic construct
  source 1..22: mol_type = other RNA
gtgggaaggaatcccgctgtct

SEQ ID NO: 34425 - RNA, 22 nt, synthetic construct
  source 1..22: mol_type = other RNA
gtggggggtgtttgggatggaa

SEQ ID NO: 34426 - RNA, 22 nt, synthetic construct
  source 1..22: mol_type = other RNA
gtggttcgcagaagcagcagtg

SEQ ID NO: 34427 - RNA, 22 nt, synthetic construct
  source 1..22: mol_type = other RNA
gtgtgccttgaatgaagagtaa

SEQ ID NO: 34428 - RNA, 22 nt, synthetic construct
  source 1..22: mol_type = other RNA
gtgtggccagctcgctcccgca

SEQ ID NO: 34429 - RNA, 22 nt, synthetic construct
  source 1..22: mol_type = other RNA
gtgtgggaaggaatcccgctgt

SEQ ID NO: 34430 - RNA, 22 nt, synthetic construct
  source 1..22: mol_type = other RNA
gtgtttgggatggaatggtgat

SEQ ID NO: 34431 - RNA, 22 nt, synthetic construct
  source 1..22: mol_type = other RNA
gtgtttggtgcgggagcgagct

SEQ ID NO: 34432 - RNA, 22 nt, synthetic construct
  source 1..22: mol_type = other RNA
gttcgcagaagcagcagtgaag

SEQ ID NO: 34433 - RNA, 22 nt, synthetic construct
  source 1..22: mol_type = other RNA
gtttgggatggaatggtgatcc

SEQ ID NO: 34434 - RNA, 22 nt, synthetic construct
  source 1..22: mol_type = other RNA
gtttggtgcgggagcgagctgg

SEQ ID NO: 34435 - RNA, 22 nt, synthetic construct
  source 1..22: mol_type = other RNA
gtttgtcagccagagacagcgg

SEQ ID NO: 34436 - RNA, 22 nt, synthetic construct
  source 1..22: mol_type = other RNA
taagctccgagtagagtttgtc

SEQ ID NO: 34437 - RNA, 22 nt, synthetic construct
  source 1..22: mol_type = other RNA
taagtgaagcccagggcctctc

SEQ ID NO: 34438 - RNA, 22 nt, synthetic construct
  source 1..22: mol_type = other RNA
taccgagacgctgaggaaatac

SEQ ID NO: 34439 - RNA, 22 nt, synthetic construct
  source 1..22: mol_type = other RNA
tacggcacgctcaccaatcgcc

SEQ ID NO: 34440 - RNA, 22 nt, synthetic construct
  source 1..22: mol_type = other RNA
tactcggagcttaccgagacgc

SEQ ID NO: 34441 - RNA, 22 nt, synthetic construct
  source 1..22: mol_type = other RNA
tactcttcattcaaggcacacc

SEQ ID NO: 34442 - RNA, 22 nt, synthetic construct
  source 1..22: mol_type = other RNA
tactgtgtttggtgcgggagcg

SEQ ID NO: 34443 - RNA, 22 nt, synthetic construct
  source 1..22: mol_type = other RNA
tagagtttgtcagccagagaca

SEQ ID NO: 34444 - RNA, 22 nt, synthetic construct
  source 1..22: mol_type = other RNA
tagcttctcttcactgctgctt

SEQ ID NO: 34445 - RNA, 22 nt, synthetic construct
  source 1..22: mol_type = other RNA
tatttcctcagcgtctcggtaa

SEQ ID NO: 34446 - RNA, 22 nt, synthetic construct
  source 1..22: mol_type = other RNA
tcaaggcacaccggcgattggt

SEQ ID NO: 34447 - RNA, 22 nt, synthetic construct
  source 1..22: mol_type = other RNA
tcacaatcactgcagcctcaca

SEQ ID NO: 34448 - RNA, 22 nt, synthetic construct
  source 1..22: mol_type = other RNA
tcacaggtgtggccagctcgct

SEQ ID NO: 34449 - RNA, 22 nt, synthetic construct
  source 1..22: mol_type = other RNA
tcaccaatcgccggtgtgcctt

SEQ ID NO: 34450 - RNA, 22 nt, synthetic construct
  source 1..22: mol_type = other RNA
tcaccattccatcccaaacacc

SEQ ID NO: 34451 - RNA, 22 nt, synthetic construct
  source 1..22: mol_type = other RNA
tcactgcagcctcacaggtgtg

SEQ ID NO: 34452 - RNA, 22 nt, synthetic construct
  source 1..22: mol_type = other RNA
tcactgctgcttctgcgaacca

SEQ ID NO: 34453 - RNA, 22 nt, synthetic construct
  source 1..22: mol_type = other RNA
tcacttactcttcattcaaggc

SEQ ID NO: 34454 - RNA, 22 nt, synthetic construct
  source 1..22: mol_type = other RNA
tcagccagagacagcgggattc

SEQ ID NO: 34455 - RNA, 22 nt, synthetic construct
  source 1..22: mol_type = other RNA
tcagcgtctcggtaagctccga

SEQ ID NO: 34456 - RNA, 22 nt, synthetic construct
  source 1..22: mol_type = other RNA
tcatcctggtgtgggaaggaat

SEQ ID NO: 34457 - RNA, 22 nt, synthetic construct
  source 1..22: mol_type = other RNA
tcattcaaggcacaccggcgat

SEQ ID NO: 34458 - RNA, 22 nt, synthetic construct
  source 1..22: mol_type = other RNA
tccacgcaggtggttcgcagaa

SEQ ID NO: 34459 - RNA, 22 nt, synthetic construct
  source 1..22: mol_type = other RNA
tcccacaccaggatgagaatca

SEQ ID NO: 34460 - RNA, 22 nt, synthetic construct
  source 1..22: mol_type = other RNA
tcccgcaccaaacacagtagct

SEQ ID NO: 34461 - RNA, 22 nt, synthetic construct
  source 1..22: mol_type = other RNA
tcccgctgtctctggctgacaa

SEQ ID NO: 34462 - RNA, 22 nt, synthetic construct
  source 1..22: mol_type = other RNA
tccgagtagagtttgtcagcca

SEQ ID NO: 34463 - RNA, 22 nt, synthetic construct
  source 1..22: mol_type = other RNA
tcctcagcgtctcggtaagctc

SEQ ID NO: 34464 - RNA, 22 nt, synthetic construct
  source 1..22: mol_type = other RNA
tcctggtgtgggaaggaatccc

SEQ ID NO: 34465 - RNA, 22 nt, synthetic construct
  source 1..22: mol_type = other RNA
tccttcccacaccaggatgaga

SEQ ID NO: 34466 - RNA, 22 nt, synthetic construct
  source 1..22: mol_type = other RNA
tcgcagaagcagcagtgaagag

SEQ ID NO: 34467 - RNA, 22 nt, synthetic construct
  source 1..22: mol_type = other RNA
tcgccggtgtgccttgaatgaa

SEQ ID NO: 34468 - RNA, 22 nt, synthetic construct
  source 1..22: mol_type = other RNA
tcgctcccgcaccaaacacagt

SEQ ID NO: 34469 - RNA, 22 nt, synthetic construct
  source 1..22: mol_type = other RNA
tcggagcttaccgagacgctga

SEQ ID NO: 34470 - RNA, 22 nt, synthetic construct
  source 1..22: mol_type = other RNA
tcggtaagctccgagtagagtt

SEQ ID NO: 34471 - RNA, 22 nt, synthetic construct
  source 1..22: mol_type = other RNA
tctactcggagcttaccgagac

SEQ ID NO: 34472 - RNA, 22 nt, synthetic construct
  source 1..22: mol_type = other RNA
tctcatcctggtgtgggaagga

SEQ ID NO: 34473 - RNA, 22 nt, synthetic construct
  source 1..22: mol_type = other RNA
tctcggtaagctccgagtagag

SEQ ID NO: 34474 - RNA, 22 nt, synthetic construct
  source 1..22: mol_type = other RNA
tctctggctgacaaactctact

SEQ ID NO: 34475 - RNA, 22 nt, synthetic construct
  source 1..22: mol_type = other RNA
tctcttcactgctgcttctgcg

SEQ ID NO: 34476 - RNA, 22 nt, synthetic construct
  source 1..22: mol_type = other RNA
tctgcgaaccacctgcgtggat

SEQ ID NO: 34477 - RNA, 22 nt, synthetic construct
  source 1..22: mol_type = other RNA
tctggctgacaaactctactcg

SEQ ID NO: 34478 - RNA, 22 nt, synthetic construct
  source 1..22: mol_type = other RNA
tcttcactgctgcttctgcgaa

SEQ ID NO: 34479 - RNA, 22 nt, synthetic construct
  source 1..22: mol_type = other RNA
tcttcattcaaggcacaccggc

SEQ ID NO: 34480 - RNA, 22 nt, synthetic construct
  source 1..22: mol_type = other RNA
tgaagagaagctactgtgtttg

SEQ ID NO: 34481 - RNA, 22 nt, synthetic construct
  source 1..22: mol_type = other RNA
tgaagagtaagtgaagcccagg

SEQ ID NO: 34482 - RNA, 22 nt, synthetic construct
  source 1..22: mol_type = other RNA
tgaagcccagggcctctcccct

SEQ ID NO: 34483 - RNA, 22 nt, synthetic construct
  source 1..22: mol_type = other RNA
tgaatgaagagtaagtgaagcc

SEQ ID NO: 34484 - RNA, 22 nt, synthetic construct
  source 1..22: mol_type = other RNA
tgacaaactctactcggagctt

SEQ ID NO: 34485 - RNA, 22 nt, synthetic construct
  source 1..22: mol_type = other RNA
tgagaatcacaatcactgcagc

SEQ ID NO: 34486 - RNA, 22 nt, synthetic construct
  source 1..22: mol_type = other RNA
tgagcgtgccgtatttcctcag

SEQ ID NO: 34487 - RNA, 22 nt, synthetic construct
  source 1..22: mol_type = other RNA
tgaggaaatacggcacgctcac

SEQ ID NO: 34488 - RNA, 22 nt, synthetic construct
  source 1..22: mol_type = other RNA
tgaggctgcagtgattgtgatt

SEQ ID NO: 34489 - RNA, 22 nt, synthetic construct
  source 1..22: mol_type = other RNA
tgatccacgcaggtggttcgca

SEQ ID NO: 34490 - RNA, 22 nt, synthetic construct
  source 1..22: mol_type = other RNA
tgattctcatcctggtgtggga

SEQ ID NO: 34491 - RNA, 22 nt, synthetic construct
  source 1..22: mol_type = other RNA
tgattgtgattctcatcctggt

SEQ ID NO: 34492 - RNA, 22 nt, synthetic construct
  source 1..22: mol_type = other RNA
tgcagcctcacaggtgtggcca

SEQ ID NO: 34493 - RNA, 22 nt, synthetic construct
  source 1..22: mol_type = other RNA
tgcagtgattgtgattctcatc

SEQ ID NO: 34494 - RNA, 22 nt, synthetic construct
  source 1..22: mol_type = other RNA
tgccgtatttcctcagcgtctc

SEQ ID NO: 34495 - RNA, 22 nt, synthetic construct
  source 1..22: mol_type = other RNA
tgccttgaatgaagagtaagtg

SEQ ID NO: 34496 - RNA, 22 nt, synthetic construct
  source 1..22: mol_type = other RNA
tgcgaaccacctgcgtggatca

SEQ ID NO: 34497 - RNA, 22 nt, synthetic construct
  source 1..22: mol_type = other RNA
tgcgggagcgagctggccacac

SEQ ID NO: 34498 - RNA, 22 nt, synthetic construct
  source 1..22: mol_type = other RNA
tgcgtggatcaccattccatcc

SEQ ID NO: 34499 - RNA, 22 nt, synthetic construct
  source 1..22: mol_type = other RNA
tgctgcttctgcgaaccacctg

SEQ ID NO: 34500 - RNA, 22 nt, synthetic construct
  source 1..22: mol_type = other RNA
tgcttctgcgaaccacctgcgt

SEQ ID NO: 34501 - RNA, 22 nt, synthetic construct
  source 1..22: mol_type = other RNA
tggaatggtgatccacgcaggt

SEQ ID NO: 34502 - RNA, 22 nt, synthetic construct
  source 1..22: mol_type = other RNA
tggatcaccattccatcccaaa

SEQ ID NO: 34503 - RNA, 22 nt, synthetic construct
  source 1..22: mol_type = other RNA
tggccacacctgtgaggctgca

SEQ ID NO: 34504 - RNA, 22 nt, synthetic construct
  source 1..22: mol_type = other RNA
tggccagctcgctcccgcacca

SEQ ID NO: 34505 - RNA, 22 nt, synthetic construct
  source 1..22: mol_type = other RNA
tggccgcaaagaggggagaggc

SEQ ID NO: 34506 - RNA, 22 nt, synthetic construct
  source 1..22: mol_type = other RNA
tggctgacaaactctactcgga

SEQ ID NO: 34507 - RNA, 22 nt, synthetic construct
  source 1..22: mol_type = other RNA
tgggaaggaatcccgctgtctc

SEQ ID NO: 34508 - RNA, 22 nt, synthetic construct
  source 1..22: mol_type = other RNA
tgggatggaatggtgatccacg

SEQ ID NO: 34509 - RNA, 22 nt, synthetic construct
  source 1..22: mol_type = other RNA
tgggcttcacttactcttcatt

SEQ ID NO: 34510 - RNA, 22 nt, synthetic construct
  source 1..22: mol_type = other RNA
tggggggtgtttgggatggaat

SEQ ID NO: 34511 - RNA, 22 nt, synthetic construct
  source 1..22: mol_type = other RNA
tggtgagcgtgccgtatttcct

SEQ ID NO: 34512 - RNA, 22 nt, synthetic construct
  source 1..22: mol_type = other RNA
tggtgatccacgcaggtggttc

SEQ ID NO: 34513 - RNA, 22 nt, synthetic construct
  source 1..22: mol_type = other RNA
tggtgcgggagcgagctggcca

SEQ ID NO: 34514 - RNA, 22 nt, synthetic construct
  source 1..22: mol_type = other RNA
tggtgtgggaaggaatcccgct

SEQ ID NO: 34515 - RNA, 22 nt, synthetic construct
  source 1..22: mol_type = other RNA
tggttcgcagaagcagcagtga

SEQ ID NO: 34516 - RNA, 22 nt, synthetic construct
  source 1..22: mol_type = other RNA
tgtcagccagagacagcgggat

SEQ ID NO: 34517 - RNA, 22 nt, synthetic construct
  source 1..22: mol_type = other RNA
tgtctctggctgacaaactcta

SEQ ID NO: 34518 - RNA, 22 nt, synthetic construct
  source 1..22: mol_type = other RNA
tgtgaggctgcagtgattgtga

SEQ ID NO: 34519 - RNA, 22 nt, synthetic construct
  source 1..22: mol_type = other RNA
tgtgattctcatcctggtgtgg

SEQ ID NO: 34520 - RNA, 22 nt, synthetic construct
  source 1..22: mol_type = other RNA
tgtgccttgaatgaagagtaag

SEQ ID NO: 34521 - RNA, 22 nt, synthetic construct
  source 1..22: mol_type = other RNA
tgtggccagctcgctcccgcac

SEQ ID NO: 34522 - RNA, 22 nt, synthetic construct
  source 1..22: mol_type = other RNA
tgtgggaaggaatcccgctgtc

SEQ ID NO: 34523 - RNA, 22 nt, synthetic construct
  source 1..22: mol_type = other RNA
tgtgtttggtgcgggagcgagc

SEQ ID NO: 34524 - RNA, 22 nt, synthetic construct
  source 1..22: mol_type = other RNA
tgtttgggatggaatggtgatc

SEQ ID NO: 34525 - RNA, 22 nt, synthetic construct
  source 1..22: mol_type = other RNA
tgtttggtgcgggagcgagctg

SEQ ID NO: 34526 - RNA, 22 nt, synthetic construct
  source 1..22: mol_type = other RNA
ttaccgagacgctgaggaaata

SEQ ID NO: 34527 - RNA, 22 nt, synthetic construct
  source 1..22: mol_type = other RNA
ttactcttcattcaaggcacac

SEQ ID NO: 34528 - RNA, 22 nt, synthetic construct
  source 1..22: mol_type = other RNA
ttcaaggcacaccggcgattgg

SEQ ID NO: 34529 - RNA, 22 nt, synthetic construct
  source 1..22: mol_type = other RNA
ttcactgctgcttctgcgaacc

SEQ ID NO: 34530 - RNA, 22 nt, synthetic construct
  source 1..22: mol_type = other RNA
ttcacttactcttcattcaagg

SEQ ID NO: 34531 - RNA, 22 nt, synthetic construct
  source 1..22: mol_type = other RNA
ttcattcaaggcacaccggcga

SEQ ID NO: 34532 - RNA, 22 nt, synthetic construct
  source 1..22: mol_type = other RNA
ttcccacaccaggatgagaatc

SEQ ID NO: 34533 - RNA, 22 nt, synthetic construct
  source 1..22: mol_type = other RNA
ttcctcagcgtctcggtaagct

SEQ ID NO: 34534 - RNA, 22 nt, synthetic construct
  source 1..22: mol_type = other RNA
ttccttcccacaccaggatgag

SEQ ID NO: 34535 - RNA, 22 nt, synthetic construct
  source 1..22: mol_type = other RNA
ttcgcagaagcagcagtgaaga

SEQ ID NO: 34536 - RNA, 22 nt, synthetic construct
  source 1..22: mol_type = other RNA
ttctcatcctggtgtgggaagg

SEQ ID NO: 34537 - RNA, 22 nt, synthetic construct
  source 1..22: mol_type = other RNA
ttctcttcactgctgcttctgc

SEQ ID NO: 34538 - RNA, 22 nt, synthetic construct
  source 1..22: mol_type = other RNA
ttctgcgaaccacctgcgtgga

SEQ ID NO: 34539 - RNA, 22 nt, synthetic construct
  source 1..22: mol_type = other RNA
ttgaatgaagagtaagtgaagc

SEQ ID NO: 34540 - RNA, 22 nt, synthetic construct
  source 1..22: mol_type = other RNA
ttgggatggaatggtgatccac

SEQ ID NO: 34541 - RNA, 22 nt, synthetic construct
  source 1..22: mol_type = other RNA
ttggtgagcgtgccgtatttcc

SEQ ID NO: 34542 - RNA, 22 nt, synthetic construct
  source 1..22: mol_type = other RNA
ttggtgcgggagcgagctggcc

SEQ ID NO: 34543 - RNA, 22 nt, synthetic construct
  source 1..22: mol_type = other RNA
ttgtcagccagagacagcggga

SEQ ID NO: 34544 - RNA, 22 nt, synthetic construct
  source 1..22: mol_type = other RNA
ttgtgattctcatcctggtgtg

SEQ ID NO: 34545 - RNA, 22 nt, synthetic construct
  source 1..22: mol_type = other RNA
tttcctcagcgtctcggtaagc

SEQ ID NO: 34546 - RNA, 22 nt, synthetic construct
  source 1..22: mol_type = other RNA
tttgggatggaatggtgatcca

SEQ ID NO: 34547 - RNA, 22 nt, synthetic construct
  source 1..22: mol_type = other RNA
tttggtgcgggagcgagctggc

SEQ ID NO: 34548 - RNA, 22 nt, synthetic construct
  source 1..22: mol_type = other RNA
tttgtcagccagagacagcggg

SEQ ID NO: 34549 - RNA, 20 nt, synthetic construct
  source 1..20: mol_type = other RNA
aaaagaccaaattcattgct

SEQ ID NO: 34550 - RNA, 20 nt, synthetic construct
  source 1..20: mol_type = other RNA
aaaagagaaggaggcaccac

SEQ ID NO: 34551 - RNA, 20 nt, synthetic construct
  source 1..20: mol_type = other RNA
aaaagaggtttgtttacttc

SEQ ID NO: 34552 - RNA, 20 nt, synthetic construct
  source 1..20: mol_type = other RNA
aaaatcaaaagaccaaattc

SEQ ID NO: 34553 - RNA, 20 nt, synthetic construct
  source 1..20: mol_type = other RNA
aaacaaacctcttttgggtc

SEQ ID NO: 34554 - RNA, 20 nt, synthetic construct
  source 1..20: mol_type = other RNA
aaacctcttttgggtcatcc

SEQ ID NO: 34555 - RNA, 20 nt, synthetic construct
  source 1..20: mol_type = other RNA
aaacctgtggtgcctccttc

SEQ ID NO: 34556 - RNA, 20 nt, synthetic construct
  source 1..20: mol_type = other RNA
aaacttacatccattgtagt

SEQ ID NO: 34557 - RNA, 20 nt, synthetic construct
  source 1..20: mol_type = other RNA
aaacttccttgggatcttgc

SEQ ID NO: 34558 - RNA, 20 nt, synthetic construct
  source 1..20: mol_type = other RNA
aaagaccaaattcattgcta

SEQ ID NO: 34559 - RNA, 20 nt, synthetic construct
  source 1..20: mol_type = other RNA
aaagagaaggaggcaccaca

SEQ ID NO: 34560 - RNA, 20 nt, synthetic construct
  source 1..20: mol_type = other RNA
aaagaggtttgtttacttcc

SEQ ID NO: 34561 - RNA, 20 nt, synthetic construct
  source 1..20: mol_type = other RNA
aaagcgattatacatcagga

SEQ ID NO: 34562 - RNA, 20 nt, synthetic construct
  source 1..20: mol_type = other RNA
aaataaagcgattatacatc

SEQ ID NO: 34563 - RNA, 20 nt, synthetic construct
  source 1..20: mol_type = other RNA
aaatcaaaagaccaaattca

SEQ ID NO: 34564 - RNA, 20 nt, synthetic construct
  source 1..20: mol_type = other RNA
aacaaacctcttttgggtca

SEQ ID NO: 34565 - RNA, 20 nt, synthetic construct
  source 1..20: mol_type = other RNA
aacaaccaaaagagaaggag

SEQ ID NO: 34566 - RNA, 20 nt, synthetic construct
  source 1..20: mol_type = other RNA
aaccaaaagagaaggaggca

SEQ ID NO: 34567 - RNA, 20 nt, synthetic construct
  source 1..20: mol_type = other RNA
aacctcttttgggtcatccc

SEQ ID NO: 34568 - RNA, 20 nt, synthetic construct
  source 1..20: mol_type = other RNA
aacctgtggtgcctccttct

SEQ ID NO: 34569 - RNA, 20 nt, synthetic construct
  source 1..20: mol_type = other RNA
aacttacatccattgtagta

SEQ ID NO: 34570 - RNA, 20 nt, synthetic construct
  source 1..20: mol_type = other RNA
aacttccttgggatcttgct

SEQ ID NO: 34571 - RNA, 20 nt, synthetic construct
  source 1..20: mol_type = other RNA
aacttgcgcctgtcaggggc

SEQ ID NO: 34572 - RNA, 20 nt, synthetic construct
  source 1..20: mol_type = other RNA
aagagaaggaggcaccacag

SEQ ID NO: 34573 - RNA, 20 nt, synthetic construct
  source 1..20: mol_type = other RNA
aagaggtttgtttacttcct

SEQ ID NO: 34574 - RNA, 20 nt, synthetic construct
  source 1..20: mol_type = other RNA
aagatcccaaggaagtttaa

SEQ ID NO: 34575 - RNA, 20 nt, synthetic construct
  source 1..20: mol_type = other RNA
aagcaagatcccaaggaagt

SEQ ID NO: 34576 - RNA, 20 nt, synthetic construct
  source 1..20: mol_type = other RNA
aagcagcttaaacttccttg

SEQ ID NO: 34577 - RNA, 20 nt, synthetic construct
  source 1..20: mol_type = other RNA
aagcgattatacatcaggaa

SEQ ID NO: 34578 - RNA, 20 nt, synthetic construct
  source 1..20: mol_type = other RNA
aagctgcttggggatgaccc

SEQ ID NO: 34579 - RNA, 20 nt, synthetic construct
  source 1..20: mol_type = other RNA
aaggaagtttaagctgcttg

SEQ ID NO: 34580 - RNA, 20 nt, synthetic construct
  source 1..20: mol_type = other RNA
aaggaggcaccacaggtttc

SEQ ID NO: 34581 - RNA, 20 nt, synthetic construct
  source 1..20: mol_type = other RNA
aagtaaacaaacctcttttg

SEQ ID NO: 34582 - RNA, 20 nt, synthetic construct
  source 1..20: mol_type = other RNA
aagttctcctgaaaaatcaa

SEQ ID NO: 34583 - RNA, 20 nt, synthetic construct
  source 1..20: mol_type = other RNA
aagtttaagctgcttgggga

SEQ ID NO: 34584 - RNA, 20 nt, synthetic construct
  source 1..20: mol_type = other RNA
aagtttgccagaagcaagat

SEQ ID NO: 34585 - RNA, 20 nt, synthetic construct
  source 1..20: mol_type = other RNA
aataaagcgattatacatca

SEQ ID NO: 34586 - RNA, 20 nt, synthetic construct
  source 1..20: mol_type = other RNA
aatcaaaagaccaaattcat

SEQ ID NO: 34587 - RNA, 20 nt, synthetic construct
  source 1..20: mol_type = other RNA
aatgaatttggtcttttgat

SEQ ID NO: 34588 - RNA, 20 nt, synthetic construct
  source 1..20: mol_type = other RNA
aatggatgtaagtttgccag

SEQ ID NO: 34589 - RNA, 20 nt, synthetic construct
  source 1..20: mol_type = other RNA
acaaacctcttttgggtcat

SEQ ID NO: 34590 - RNA, 20 nt, synthetic construct
  source 1..20: mol_type = other RNA
acaaccaaaagagaaggagg

SEQ ID NO: 34591 - RNA, 20 nt, synthetic construct
  source 1..20: mol_type = other RNA
acaatggatgtaagtttgcc

SEQ ID NO: 34592 - RNA, 20 nt, synthetic construct
  source 1..20: mol_type = other RNA
acaggcgcaagttctcctga

SEQ ID NO: 34593 - RNA, 20 nt, synthetic construct
  source 1..20: mol_type = other RNA
acaggtttctggatccagcc

SEQ ID NO: 34594 - RNA, 20 nt, synthetic construct
  source 1..20: mol_type = other RNA
acatcaggaagtaaacaaac

SEQ ID NO: 34595 - RNA, 20 nt, synthetic construct
  source 1..20: mol_type = other RNA
acatccattgtagtacatgc

SEQ ID NO: 34596 - RNA, 20 nt, synthetic construct
  source 1..20: mol_type = other RNA
acatgctccatgaacaacca

SEQ ID NO: 34597 - RNA, 20 nt, synthetic construct
  source 1..20: mol_type = other RNA
accaaaagagaaggaggcac

SEQ ID NO: 34598 - RNA, 20 nt, synthetic construct
  source 1..20: mol_type = other RNA
accacaggtttctggatcca

SEQ ID NO: 34599 - RNA, 20 nt, synthetic construct
  source 1..20: mol_type = other RNA
acccaaaagaggtttgttta

SEQ ID NO: 34600 - RNA, 20 nt, synthetic construct
  source 1..20: mol_type = other RNA
acctcttttgggtcatcccc

SEQ ID NO: 34601 - RNA, 20 nt, synthetic construct
  source 1..20: mol_type = other RNA
acctgtggtgcctccttctc

SEQ ID NO: 34602 - RNA, 20 nt, synthetic construct
  source 1..20: mol_type = other RNA
actacaatggatgtaagttt

SEQ ID NO: 34603 - RNA, 20 nt, synthetic construct
  source 1..20: mol_type = other RNA
acttacatccattgtagtac

SEQ ID NO: 34604 - RNA, 20 nt, synthetic construct
  source 1..20: mol_type = other RNA
acttcctgatgtataatcgc

SEQ ID NO: 34605 - RNA, 20 nt, synthetic construct
  source 1..20: mol_type = other RNA
acttccttgggatcttgctt

SEQ ID NO: 34606 - RNA, 20 nt, synthetic construct
  source 1..20: mol_type = other RNA
acttgcgcctgtcaggggct

SEQ ID NO: 34607 - RNA, 20 nt, synthetic construct
  source 1..20: mol_type = other RNA
agaaacctgtggtgcctcct

SEQ ID NO: 34608 - RNA, 20 nt, synthetic construct
  source 1..20: mol_type = other RNA
agaacttgcgcctgtcaggg

SEQ ID NO: 34609 - RNA, 20 nt, synthetic construct
  source 1..20: mol_type = other RNA
agaagcaagatcccaaggaa

SEQ ID NO: 34610 - RNA, 20 nt, synthetic construct
  source 1..20: mol_type = other RNA
agaaggaggcaccacaggtt

SEQ ID NO: 34611 - RNA, 20 nt, synthetic construct
  source 1..20: mol_type = other RNA
agagaaggaggcaccacagg

SEQ ID NO: 34612 - RNA, 20 nt, synthetic construct
  source 1..20: mol_type = other RNA
agaggtttgtttacttcctg

SEQ ID NO: 34613 - RNA, 20 nt, synthetic construct
  source 1..20: mol_type = other RNA
agatcccaaggaagtttaag

SEQ ID NO: 34614 - RNA, 20 nt, synthetic construct
  source 1..20: mol_type = other RNA
agcaagatcccaaggaagtt

SEQ ID NO: 34615 - RNA, 20 nt, synthetic construct
  source 1..20: mol_type = other RNA
agcaatgaatttggtctttt

SEQ ID NO: 34616 - RNA, 20 nt, synthetic construct
  source 1..20: mol_type = other RNA
agcagcttaaacttccttgg

SEQ ID NO: 34617 - RNA, 20 nt, synthetic construct
  source 1..20: mol_type = other RNA
agcatgtactacaatggatg

SEQ ID NO: 34618 - RNA, 20 nt, synthetic construct
  source 1..20: mol_type = other RNA
agcccctgacaggcgcaagt

SEQ ID NO: 34619 - RNA, 20 nt, synthetic construct
  source 1..20: mol_type = other RNA
agcgattatacatcaggaag

SEQ ID NO: 34620 - RNA, 20 nt, synthetic construct
  source 1..20: mol_type = other RNA
agctgcttggggatgaccca

SEQ ID NO: 34621 - RNA, 20 nt, synthetic construct
  source 1..20: mol_type = other RNA
agcttaaacttccttgggat

SEQ ID NO: 34622 - RNA, 20 nt, synthetic construct
  source 1..20: mol_type = other RNA
aggaagtaaacaaacctctt

SEQ ID NO: 34623 - RNA, 20 nt, synthetic construct
  source 1..20: mol_type = other RNA
aggaagtttaagctgcttgg

SEQ ID NO: 34624 - RNA, 20 nt, synthetic construct
  source 1..20: mol_type = other RNA
aggagaacttgcgcctgtca

SEQ ID NO: 34625 - RNA, 20 nt, synthetic construct
  source 1..20: mol_type = other RNA
aggaggcaccacaggtttct

SEQ ID NO: 34626 - RNA, 20 nt, synthetic construct
  source 1..20: mol_type = other RNA
aggcaccacaggtttctgga

SEQ ID NO: 34627 - RNA, 20 nt, synthetic construct
  source 1..20: mol_type = other RNA
aggcgcaagttctcctgaaa

SEQ ID NO: 34628 - RNA, 20 nt, synthetic construct
  source 1..20: mol_type = other RNA
aggggctggatccagaaacc

SEQ ID NO: 34629 - RNA, 20 nt, synthetic construct
  source 1..20: mol_type = other RNA
aggtttctggatccagcccc

SEQ ID NO: 34630 - RNA, 20 nt, synthetic construct
  source 1..20: mol_type = other RNA
aggtttgtttacttcctgat

SEQ ID NO: 34631 - RNA, 20 nt, synthetic construct
  source 1..20: mol_type = other RNA
agtaaacaaacctcttttgg

SEQ ID NO: 34632 - RNA, 20 nt, synthetic construct
  source 1..20: mol_type = other RNA
agtacatgctccatgaacaa

SEQ ID NO: 34633 - RNA, 20 nt, synthetic construct
  source 1..20: mol_type = other RNA
agttctcctgaaaaatcaaa

SEQ ID NO: 34634 - RNA, 20 nt, synthetic construct
  source 1..20: mol_type = other RNA
agtttaagctgcttggggat

SEQ ID NO: 34635 - RNA, 20 nt, synthetic construct
  source 1..20: mol_type = other RNA
agtttgccagaagcaagatc

SEQ ID NO: 34636 - RNA, 20 nt, synthetic construct
  source 1..20: mol_type = other RNA
ataaagcgattatacatcag

SEQ ID NO: 34637 - RNA, 20 nt, synthetic construct
  source 1..20: mol_type = other RNA
atacatcaggaagtaaacaa

SEQ ID NO: 34638 - RNA, 20 nt, synthetic construct
  source 1..20: mol_type = other RNA
atagcaatgaatttggtctt

SEQ ID NO: 34639 - RNA, 20 nt, synthetic construct
  source 1..20: mol_type = other RNA
atcaaaagaccaaattcatt

SEQ ID NO: 34640 - RNA, 20 nt, synthetic construct
  source 1..20: mol_type = other RNA
atcaggaagtaaacaaacct

SEQ ID NO: 34641 - RNA, 20 nt, synthetic construct
  source 1..20: mol_type = other RNA
atccagaaacctgtggtgcc

SEQ ID NO: 34642 - RNA, 20 nt, synthetic construct
  source 1..20: mol_type = other RNA
atccagcccctgacaggcgc

SEQ ID NO: 34643 - RNA, 20 nt, synthetic construct
  source 1..20: mol_type = other RNA
atccatagcaatgaatttgg

SEQ ID NO: 34644 - RNA, 20 nt, synthetic construct
  source 1..20: mol_type = other RNA
atccattgtagtacatgctc

SEQ ID NO: 34645 - RNA, 20 nt, synthetic construct
  source 1..20: mol_type = other RNA
atcccaaggaagtttaagct

SEQ ID NO: 34646 - RNA, 20 nt, synthetic construct
  source 1..20: mol_type = other RNA
atccccaagcagcttaaact

SEQ ID NO: 34647 - RNA, 20 nt, synthetic construct
  source 1..20: mol_type = other RNA
atcttgcttctggcaaactt

SEQ ID NO: 34648 - RNA, 20 nt, synthetic construct
  source 1..20: mol_type = other RNA
atgaacaaccaaaagagaag

SEQ ID NO: 34649 - RNA, 20 nt, synthetic construct
  source 1..20: mol_type = other RNA
atgaatttggtcttttgatt

SEQ ID NO: 34650 - RNA, 20 nt, synthetic construct
  source 1..20: mol_type = other RNA
atgacccaaaagaggtttgt

SEQ ID NO: 34651 - RNA, 20 nt, synthetic construct
  source 1..20: mol_type = other RNA
atgctccatgaacaaccaaa

SEQ ID NO: 34652 - RNA, 20 nt, synthetic construct
  source 1..20: mol_type = other RNA
atggagcatgtactacaatg

SEQ ID NO: 34653 - RNA, 20 nt, synthetic construct
  source 1..20: mol_type = other RNA
atggatgtaagtttgccaga

SEQ ID NO: 34654 - RNA, 20 nt, synthetic construct
  source 1..20: mol_type = other RNA
atgtaagtttgccagaagca

SEQ ID NO: 34655 - RNA, 20 nt, synthetic construct
  source 1..20: mol_type = other RNA
atgtactacaatggatgtaa

SEQ ID NO: 34656 - RNA, 20 nt, synthetic construct
  source 1..20: mol_type = other RNA
attatacatcaggaagtaaa

SEQ ID NO: 34657 - RNA, 20 nt, synthetic construct
  source 1..20: mol_type = other RNA
attgtagtacatgctccatg

SEQ ID NO: 34658 - RNA, 20 nt, synthetic construct
  source 1..20: mol_type = other RNA
atttggtcttttgatttttc

SEQ ID NO: 34659 - RNA, 20 nt, synthetic construct
  source 1..20: mol_type = other RNA
atttttcaggagaacttgcg

SEQ ID NO: 34660 - RNA, 20 nt, synthetic construct
  source 1..20: mol_type = other RNA
caaaagaccaaattcattgc

SEQ ID NO: 34661 - RNA, 20 nt, synthetic construct
  source 1..20: mol_type = other RNA
caaaagagaaggaggcacca

SEQ ID NO: 34662 - RNA, 20 nt, synthetic construct
  source 1..20: mol_type = other RNA
caaaagaggtttgtttactt

SEQ ID NO: 34663 - RNA, 20 nt, synthetic construct
  source 1..20: mol_type = other RNA
caaacctcttttgggtcatc

SEQ ID NO: 34664 - RNA, 20 nt, synthetic construct
  source 1..20: mol_type = other RNA
caaacttacatccattgtag

SEQ ID NO: 34665 - RNA, 20 nt, synthetic construct
  source 1..20: mol_type = other RNA
caaccaaaagagaaggaggc

SEQ ID NO: 34666 - RNA, 20 nt, synthetic construct
  source 1..20: mol_type = other RNA
caagatcccaaggaagttta

SEQ ID NO: 34667 - RNA, 20 nt, synthetic construct
  source 1..20: mol_type = other RNA
caagcagcttaaacttcctt

SEQ ID NO: 34668 - RNA, 20 nt, synthetic construct
  source 1..20: mol_type = other RNA
caaggaagtttaagctgctt

SEQ ID NO: 34669 - RNA, 20 nt, synthetic construct
  source 1..20: mol_type = other RNA
caagttctcctgaaaaatca

SEQ ID NO: 34670 - RNA, 20 nt, synthetic construct
  source 1..20: mol_type = other RNA
caatgaatttggtcttttga

SEQ ID NO: 34671 - RNA, 20 nt, synthetic construct
  source 1..20: mol_type = other RNA
caatggatgtaagtttgcca

SEQ ID NO: 34672 - RNA, 20 nt, synthetic construct
  source 1..20: mol_type = other RNA
cacaggtttctggatccagc

SEQ ID NO: 34673 - RNA, 20 nt, synthetic construct
  source 1..20: mol_type = other RNA
caccacaggtttctggatcc

SEQ ID NO: 34674 - RNA, 20 nt, synthetic construct
  source 1..20: mol_type = other RNA
cagaaacctgtggtgcctcc

SEQ ID NO: 34675 - RNA, 20 nt, synthetic construct
  source 1..20: mol_type = other RNA
cagaagcaagatcccaagga

SEQ ID NO: 34676 - RNA, 20 nt, synthetic construct
  source 1..20: mol_type = other RNA
cagcccctgacaggcgcaag

SEQ ID NO: 34677 - RNA, 20 nt, synthetic construct
  source 1..20: mol_type = other RNA
cagcttaaacttccttggga

SEQ ID NO: 34678 - RNA, 20 nt, synthetic construct
  source 1..20: mol_type = other RNA
caggaagtaaacaaacctct

SEQ ID NO: 34679 - RNA, 20 nt, synthetic construct
  source 1..20: mol_type = other RNA
caggagaacttgcgcctgtc

SEQ ID NO: 34680 - RNA, 20 nt, synthetic construct
  source 1..20: mol_type = other RNA
caggcgcaagttctcctgaa

SEQ ID NO: 34681 - RNA, 20 nt, synthetic construct
  source 1..20: mol_type = other RNA
caggggctggatccagaaac

SEQ ID NO: 34682 - RNA, 20 nt, synthetic construct
  source 1..20: mol_type = other RNA
caggtttctggatccagccc

SEQ ID NO: 34683 - RNA, 20 nt, synthetic construct
  source 1..20: mol_type = other RNA
catagcaatgaatttggtct

SEQ ID NO: 34684 - RNA, 20 nt, synthetic construct
  source 1..20: mol_type = other RNA
catcaggaagtaaacaaacc

SEQ ID NO: 34685 - RNA, 20 nt, synthetic construct
  source 1..20: mol_type = other RNA
catccattgtagtacatgct

SEQ ID NO: 34686 - RNA, 20 nt, synthetic construct
  source 1..20: mol_type = other RNA
catccccaagcagcttaaac

SEQ ID NO: 34687 - RNA, 20 nt, synthetic construct
  source 1..20: mol_type = other RNA
catgaacaaccaaaagagaa

SEQ ID NO: 34688 - RNA, 20 nt, synthetic construct
  source 1..20: mol_type = other RNA
catgctccatgaacaaccaa

SEQ ID NO: 34689 - RNA, 20 nt, synthetic construct
  source 1..20: mol_type = other RNA
catggagcatgtactacaat

SEQ ID NO: 34690 - RNA, 20 nt, synthetic construct
  source 1..20: mol_type = other RNA
catgtactacaatggatgta

SEQ ID NO: 34691 - RNA, 20 nt, synthetic construct
  source 1..20: mol_type = other RNA
cattgtagtacatgctccat

SEQ ID NO: 34692 - RNA, 20 nt, synthetic construct
  source 1..20: mol_type = other RNA
ccaaaagagaaggaggcacc

SEQ ID NO: 34693 - RNA, 20 nt, synthetic construct
  source 1..20: mol_type = other RNA
ccaaaagaggtttgtttact

SEQ ID NO: 34694 - RNA, 20 nt, synthetic construct
  source 1..20: mol_type = other RNA
ccaagcagcttaaacttcct

SEQ ID NO: 34695 - RNA, 20 nt, synthetic construct
  source 1..20: mol_type = other RNA
ccaaggaagtttaagctgct

SEQ ID NO: 34696 - RNA, 20 nt, synthetic construct
  source 1..20: mol_type = other RNA
ccacaggtttctggatccag

SEQ ID NO: 34697 - RNA, 20 nt, synthetic construct
  source 1..20: mol_type = other RNA
ccagaaacctgtggtgcctc

SEQ ID NO: 34698 - RNA, 20 nt, synthetic construct
  source 1..20: mol_type = other RNA
ccagaagcaagatcccaagg

SEQ ID NO: 34699 - RNA, 20 nt, synthetic construct
  source 1..20: mol_type = other RNA
ccagcccctgacaggcgcaa

SEQ ID NO: 34700 - RNA, 20 nt, synthetic construct
  source 1..20: mol_type = other RNA
ccatagcaatgaatttggtc

SEQ ID NO: 34701 - RNA, 20 nt, synthetic construct
  source 1..20: mol_type = other RNA
ccatgaacaaccaaaagaga

SEQ ID NO: 34702 - RNA, 20 nt, synthetic construct
  source 1..20: mol_type = other RNA
ccattgtagtacatgctcca

SEQ ID NO: 34703 - RNA, 20 nt, synthetic construct
  source 1..20: mol_type = other RNA
cccaaaagaggtttgtttac

SEQ ID NO: 34704 - RNA, 20 nt, synthetic construct
  source 1..20: mol_type = other RNA
cccaagcagcttaaacttcc

SEQ ID NO: 34705 - RNA, 20 nt, synthetic construct
  source 1..20: mol_type = other RNA
cccaaggaagtttaagctgc

SEQ ID NO: 34706 - RNA, 20 nt, synthetic construct
  source 1..20: mol_type = other RNA
ccccaagcagcttaaacttc

SEQ ID NO: 34707 - RNA, 20 nt, synthetic construct
  source 1..20: mol_type = other RNA
cccctgacaggcgcaagttc

SEQ ID NO: 34708 - RNA, 20 nt, synthetic construct
  source 1..20: mol_type = other RNA
ccctgacaggcgcaagttct

SEQ ID NO: 34709 - RNA, 20 nt, synthetic construct
  source 1..20: mol_type = other RNA
cctccttctcttttggttgt

SEQ ID NO: 34710 - RNA, 20 nt, synthetic construct
  source 1..20: mol_type = other RNA
cctcttttgggtcatcccca

SEQ ID NO: 34711 - RNA, 20 nt, synthetic construct
  source 1..20: mol_type = other RNA
cctgaaaaatcaaaagacca

SEQ ID NO: 34712 - RNA, 20 nt, synthetic construct
  source 1..20: mol_type = other RNA
cctgacaggcgcaagttctc

SEQ ID NO: 34713 - RNA, 20 nt, synthetic construct
  source 1..20: mol_type = other RNA
cctgtcaggggctggatcca

SEQ ID NO: 34714 - RNA, 20 nt, synthetic construct
  source 1..20: mol_type = other RNA
cctgtggtgcctccttctct

SEQ ID NO: 34715 - RNA, 20 nt, synthetic construct
  source 1..20: mol_type = other RNA
ccttctcttttggttgttca

SEQ ID NO: 34716 - RNA, 20 nt, synthetic construct
  source 1..20: mol_type = other RNA
ccttgggatcttgcttctgg

SEQ ID NO: 34717 - RNA, 20 nt, synthetic construct
  source 1..20: mol_type = other RNA
cgattatacatcaggaagta

SEQ ID NO: 34718 - RNA, 20 nt, synthetic construct
  source 1..20: mol_type = other RNA
cgcaagttctcctgaaaaat

SEQ ID NO: 34719 - RNA, 20 nt, synthetic construct
  source 1..20: mol_type = other RNA
cgcctgtcaggggctggatc

SEQ ID NO: 34720 - RNA, 20 nt, synthetic construct
  source 1..20: mol_type = other RNA
ctacaatggatgtaagtttg

SEQ ID NO: 34721 - RNA, 20 nt, synthetic construct
  source 1..20: mol_type = other RNA
ctatccatagcaatgaattt

SEQ ID NO: 34722 - RNA, 20 nt, synthetic construct
  source 1..20: mol_type = other RNA
ctccatgaacaaccaaaaga

SEQ ID NO: 34723 - RNA, 20 nt, synthetic construct
  source 1..20: mol_type = other RNA
ctcctgaaaaatcaaaagac

SEQ ID NO: 34724 - RNA, 20 nt, synthetic construct
  source 1..20: mol_type = other RNA
ctccttctcttttggttgtt

SEQ ID NO: 34725 - RNA, 20 nt, synthetic construct
  source 1..20: mol_type = other RNA
ctcttttgggtcatccccaa

SEQ ID NO: 34726 - RNA, 20 nt, synthetic construct
  source 1..20: mol_type = other RNA
ctcttttggttgttcatgga

SEQ ID NO: 34727 - RNA, 20 nt, synthetic construct
  source 1..20: mol_type = other RNA
ctgaaaaatcaaaagaccaa

SEQ ID NO: 34728 - RNA, 20 nt, synthetic construct
  source 1..20: mol_type = other RNA
ctgacaggcgcaagttctcc

SEQ ID NO: 34729 - RNA, 20 nt, synthetic construct
  source 1..20: mol_type = other RNA
ctgcttggggatgacccaaa

SEQ ID NO: 34730 - RNA, 20 nt, synthetic construct
  source 1..20: mol_type = other RNA
ctggatccagaaacctgtgg

SEQ ID NO: 34731 - RNA, 20 nt, synthetic construct
  source 1..20: mol_type = other RNA
ctggatccagcccctgacag

SEQ ID NO: 34732 - RNA, 20 nt, synthetic construct
  source 1..20: mol_type = other RNA
ctggcaaacttacatccatt

SEQ ID NO: 34733 - RNA, 20 nt, synthetic construct
  source 1..20: mol_type = other RNA
ctgtcaggggctggatccag

SEQ ID NO: 34734 - RNA, 20 nt, synthetic construct
  source 1..20: mol_type = other RNA
ctgtggtgcctccttctctt

SEQ ID NO: 34735 - RNA, 20 nt, synthetic construct
  source 1..20: mol_type = other RNA
cttaaacttccttgggatct

SEQ ID NO: 34736 - RNA, 20 nt, synthetic construct
  source 1..20: mol_type = other RNA
cttacatccattgtagtaca

SEQ ID NO: 34737 - RNA, 20 nt, synthetic construct
  source 1..20: mol_type = other RNA
cttcctgatgtataatcgct

SEQ ID NO: 34738 - RNA, 20 nt, synthetic construct
  source 1..20: mol_type = other RNA
cttccttgggatcttgcttc

SEQ ID NO: 34739 - RNA, 20 nt, synthetic construct
  source 1..20: mol_type = other RNA
cttctcttttggttgttcat

SEQ ID NO: 34740 - RNA, 20 nt, synthetic construct
  source 1..20: mol_type = other RNA
cttctggcaaacttacatcc

SEQ ID NO: 34741 - RNA, 20 nt, synthetic construct
  source 1..20: mol_type = other RNA
cttgcgcctgtcaggggctg

SEQ ID NO: 34742 - RNA, 20 nt, synthetic construct
  source 1..20: mol_type = other RNA
cttgcttctggcaaacttac

SEQ ID NO: 34743 - RNA, 20 nt, synthetic construct
  source 1..20: mol_type = other RNA
cttgggatcttgcttctggc

SEQ ID NO: 34744 - RNA, 20 nt, synthetic construct
  source 1..20: mol_type = other RNA
cttggggatgacccaaaaga

SEQ ID NO: 34745 - RNA, 20 nt, synthetic construct
  source 1..20: mol_type = other RNA
cttttgatttttcaggagaa

SEQ ID NO: 34746 - RNA, 20 nt, synthetic construct
  source 1..20: mol_type = other RNA
cttttgggtcatccccaagc

SEQ ID NO: 34747 - RNA, 20 nt, synthetic construct
  source 1..20: mol_type = other RNA
cttttggttgttcatggagc

SEQ ID NO: 34748 - RNA, 20 nt, synthetic construct
  source 1..20: mol_type = other RNA
gaaaaataaagcgattatac

SEQ ID NO: 34749 - RNA, 20 nt, synthetic construct
  source 1..20: mol_type = other RNA
gaaaaatcaaaagaccaaat

SEQ ID NO: 34750 - RNA, 20 nt, synthetic construct
  source 1..20: mol_type = other RNA
gaaacctgtggtgcctcctt

SEQ ID NO: 34751 - RNA, 20 nt, synthetic construct
  source 1..20: mol_type = other RNA
gaacaaccaaaagagaagga

SEQ ID NO: 34752 - RNA, 20 nt, synthetic construct
  source 1..20: mol_type = other RNA
gaacttgcgcctgtcagggg

SEQ ID NO: 34753 - RNA, 20 nt, synthetic construct
  source 1..20: mol_type = other RNA
gaagcaagatcccaaggaag

SEQ ID NO: 34754 - RNA, 20 nt, synthetic construct
  source 1..20: mol_type = other RNA
gaaggaggcaccacaggttt

SEQ ID NO: 34755 - RNA, 20 nt, synthetic construct
  source 1..20: mol_type = other RNA
gaagtaaacaaacctctttt

SEQ ID NO: 34756 - RNA, 20 nt, synthetic construct
  source 1..20: mol_type = other RNA
gaagtttaagctgcttgggg

SEQ ID NO: 34757 - RNA, 20 nt, synthetic construct
  source 1..20: mol_type = other RNA
gaatttggtcttttgatttt

SEQ ID NO: 34758 - RNA, 20 nt, synthetic construct
  source 1..20: mol_type = other RNA
gacaggcgcaagttctcctg

SEQ ID NO: 34759 - RNA, 20 nt, synthetic construct
  source 1..20: mol_type = other RNA
gacccaaaagaggtttgttt

SEQ ID NO: 34760 - RNA, 20 nt, synthetic construct
  source 1..20: mol_type = other RNA
gagaacttgcgcctgtcagg

SEQ ID NO: 34761 - RNA, 20 nt, synthetic construct
  source 1..20: mol_type = other RNA
gagaaggaggcaccacaggt

SEQ ID NO: 34762 - RNA, 20 nt, synthetic construct
  source 1..20: mol_type = other RNA
gagcatgtactacaatggat

SEQ ID NO: 34763 - RNA, 20 nt, synthetic construct
  source 1..20: mol_type = other RNA
gaggcaccacaggtttctgg

SEQ ID NO: 34764 - RNA, 20 nt, synthetic construct
  source 1..20: mol_type = other RNA
gaggtttgtttacttcctga

SEQ ID NO: 34765 - RNA, 20 nt, synthetic construct
  source 1..20: mol_type = other RNA
gatccagaaacctgtggtgc

SEQ ID NO: 34766 - RNA, 20 nt, synthetic construct
  source 1..20: mol_type = other RNA
gatccagcccctgacaggcg

SEQ ID NO: 34767 - RNA, 20 nt, synthetic construct
  source 1..20: mol_type = other RNA
gatcccaaggaagtttaagc

SEQ ID NO: 34768 - RNA, 20 nt, synthetic construct
  source 1..20: mol_type = other RNA
gatcttgcttctggcaaact

SEQ ID NO: 34769 - RNA, 20 nt, synthetic construct
  source 1..20: mol_type = other RNA
gatgacccaaaagaggtttg

SEQ ID NO: 34770 - RNA, 20 nt, synthetic construct
  source 1..20: mol_type = other RNA
gatgtaagtttgccagaagc

SEQ ID NO: 34771 - RNA, 20 nt, synthetic construct
  source 1..20: mol_type = other RNA
gattatacatcaggaagtaa

SEQ ID NO: 34772 - RNA, 20 nt, synthetic construct
  source 1..20: mol_type = other RNA
gatttttcaggagaacttgc

SEQ ID NO: 34773 - RNA, 20 nt, synthetic construct
  source 1..20: mol_type = other RNA
gcaaacttacatccattgta

SEQ ID NO: 34774 - RNA, 20 nt, synthetic construct
  source 1..20: mol_type = other RNA
gcaagatcccaaggaagttt

SEQ ID NO: 34775 - RNA, 20 nt, synthetic construct
  source 1..20: mol_type = other RNA
gcaagttctcctgaaaaatc

SEQ ID NO: 34776 - RNA, 20 nt, synthetic construct
  source 1..20: mol_type = other RNA
gcaatgaatttggtcttttg

SEQ ID NO: 34777 - RNA, 20 nt, synthetic construct
  source 1..20: mol_type = other RNA
gcaccacaggtttctggatc

SEQ ID NO: 34778 - RNA, 20 nt, synthetic construct
  source 1..20: mol_type = other RNA
gcagcttaaacttccttggg

SEQ ID NO: 34779 - RNA, 20 nt, synthetic construct
  source 1..20: mol_type = other RNA
gcatgtactacaatggatgt

SEQ ID NO: 34780 - RNA, 20 nt, synthetic construct
  source 1..20: mol_type = other RNA
gccagaagcaagatcccaag

SEQ ID NO: 34781 - RNA, 20 nt, synthetic construct
  source 1..20: mol_type = other RNA
gcccctgacaggcgcaagtt

SEQ ID NO: 34782 - RNA, 20 nt, synthetic construct
  source 1..20: mol_type = other RNA
gcctccttctcttttggttg

SEQ ID NO: 34783 - RNA, 20 nt, synthetic construct
  source 1..20: mol_type = other RNA
gcctgtcaggggctggatcc

SEQ ID NO: 34784 - RNA, 20 nt, synthetic construct
  source 1..20: mol_type = other RNA
gcgattatacatcaggaagt

SEQ ID NO: 34785 - RNA, 20 nt, synthetic construct
  source 1..20: mol_type = other RNA
gcgcaagttctcctgaaaaa

SEQ ID NO: 34786 - RNA, 20 nt, synthetic construct
  source 1..20: mol_type = other RNA
gcgcctgtcaggggctggat

SEQ ID NO: 34787 - RNA, 20 nt, synthetic construct
  source 1..20: mol_type = other RNA
gctatccatagcaatgaatt

SEQ ID NO: 34788 - RNA, 20 nt, synthetic construct
  source 1..20: mol_type = other RNA
gctccatgaacaaccaaaag

SEQ ID NO: 34789 - RNA, 20 nt, synthetic construct
  source 1..20: mol_type = other RNA
gctgcttggggatgacccaa

SEQ ID NO: 34790 - RNA, 20 nt, synthetic construct
  source 1..20: mol_type = other RNA
gctggatccagaaacctgtg

SEQ ID NO: 34791 - RNA, 20 nt, synthetic construct
  source 1..20: mol_type = other RNA
gcttaaacttccttgggatc

SEQ ID NO: 34792 - RNA, 20 nt, synthetic construct
  source 1..20: mol_type = other RNA
gcttctggcaaacttacatc

SEQ ID NO: 34793 - RNA, 20 nt, synthetic construct
  source 1..20: mol_type = other RNA
gcttggggatgacccaaaag

SEQ ID NO: 34794 - RNA, 20 nt, synthetic construct
  source 1..20: mol_type = other RNA
ggaagtaaacaaacctcttt

SEQ ID NO: 34795 - RNA, 20 nt, synthetic construct
  source 1..20: mol_type = other RNA
ggaagtttaagctgcttggg

SEQ ID NO: 34796 - RNA, 20 nt, synthetic construct
  source 1..20: mol_type = other RNA
ggagaacttgcgcctgtcag

SEQ ID NO: 34797 - RNA, 20 nt, synthetic construct
  source 1..20: mol_type = other RNA
ggagcatgtactacaatgga

SEQ ID NO: 34798 - RNA, 20 nt, synthetic construct
  source 1..20: mol_type = other RNA
ggaggcaccacaggtttctg

SEQ ID NO: 34799 - RNA, 20 nt, synthetic construct
  source 1..20: mol_type = other RNA
ggatccagaaacctgtggtg

SEQ ID NO: 34800 - RNA, 20 nt, synthetic construct
  source 1..20: mol_type = other RNA
ggatccagcccctgacaggc

SEQ ID NO: 34801 - RNA, 20 nt, synthetic construct
  source 1..20: mol_type = other RNA
ggatcttgcttctggcaaac

SEQ ID NO: 34802 - RNA, 20 nt, synthetic construct
  source 1..20: mol_type = other RNA
ggatgacccaaaagaggttt

SEQ ID NO: 34803 - RNA, 20 nt, synthetic construct
  source 1..20: mol_type = other RNA
ggatgtaagtttgccagaag

SEQ ID NO: 34804 - RNA, 20 nt, synthetic construct
  source 1..20: mol_type = other RNA
ggcaaacttacatccattgt

SEQ ID NO: 34805 - RNA, 20 nt, synthetic construct
  source 1..20: mol_type = other RNA
ggcaccacaggtttctggat

SEQ ID NO: 34806 - RNA, 20 nt, synthetic construct
  source 1..20: mol_type = other RNA
ggcgcaagttctcctgaaaa

SEQ ID NO: 34807 - RNA, 20 nt, synthetic construct
  source 1..20: mol_type = other RNA
ggctggatccagaaacctgt

SEQ ID NO: 34808 - RNA, 20 nt, synthetic construct
  source 1..20: mol_type = other RNA
gggatcttgcttctggcaaa

SEQ ID NO: 34809 - RNA, 20 nt, synthetic construct
  source 1..20: mol_type = other RNA
gggatgacccaaaagaggtt

SEQ ID NO: 34810 - RNA, 20 nt, synthetic construct
  source 1..20: mol_type = other RNA
gggctggatccagaaacctg

SEQ ID NO: 34811 - RNA, 20 nt, synthetic construct
  source 1..20: mol_type = other RNA
ggggatgacccaaaagaggt

SEQ ID NO: 34812 - RNA, 20 nt, synthetic construct
  source 1..20: mol_type = other RNA
ggggctggatccagaaacct

SEQ ID NO: 34813 - RNA, 20 nt, synthetic construct
  source 1..20: mol_type = other RNA
gggtcatccccaagcagctt

SEQ ID NO: 34814 - RNA, 20 nt, synthetic construct
  source 1..20: mol_type = other RNA
ggtcatccccaagcagctta

SEQ ID NO: 34815 - RNA, 20 nt, synthetic construct
  source 1..20: mol_type = other RNA
ggtcttttgatttttcagga

SEQ ID NO: 34816 - RNA, 20 nt, synthetic construct
  source 1..20: mol_type = other RNA
ggtgcctccttctcttttgg

SEQ ID NO: 34817 - RNA, 20 nt, synthetic construct
  source 1..20: mol_type = other RNA
ggttgttcatggagcatgta

SEQ ID NO: 34818 - RNA, 20 nt, synthetic construct
  source 1..20: mol_type = other RNA
ggtttctggatccagcccct

SEQ ID NO: 34819 - RNA, 20 nt, synthetic construct
  source 1..20: mol_type = other RNA
ggtttgtttacttcctgatg

SEQ ID NO: 34820 - RNA, 20 nt, synthetic construct
  source 1..20: mol_type = other RNA
gtaaacaaacctcttttggg

SEQ ID NO: 34821 - RNA, 20 nt, synthetic construct
  source 1..20: mol_type = other RNA
gtaagtttgccagaagcaag

SEQ ID NO: 34822 - RNA, 20 nt, synthetic construct
  source 1..20: mol_type = other RNA
gtacatgctccatgaacaac

SEQ ID NO: 34823 - RNA, 20 nt, synthetic construct
  source 1..20: mol_type = other RNA
gtactacaatggatgtaagt

SEQ ID NO: 34824 - RNA, 20 nt, synthetic construct
  source 1..20: mol_type = other RNA
gtagtacatgctccatgaac

SEQ ID NO: 34825 - RNA, 20 nt, synthetic construct
  source 1..20: mol_type = other RNA
gtcaggggctggatccagaa

SEQ ID NO: 34826 - RNA, 20 nt, synthetic construct
  source 1..20: mol_type = other RNA
gtcatccccaagcagcttaa

SEQ ID NO: 34827 - RNA, 20 nt, synthetic construct
  source 1..20: mol_type = other RNA
gtcttttgatttttcaggag

SEQ ID NO: 34828 - RNA, 20 nt, synthetic construct
  source 1..20: mol_type = other RNA
gtgcctccttctcttttggt

SEQ ID NO: 34829 - RNA, 20 nt, synthetic construct
  source 1..20: mol_type = other RNA
gtggtgcctccttctctttt

SEQ ID NO: 34830 - RNA, 20 nt, synthetic construct
  source 1..20: mol_type = other RNA
gttcatggagcatgtactac

SEQ ID NO: 34831 - RNA, 20 nt, synthetic construct
  source 1..20: mol_type = other RNA
gttctcctgaaaaatcaaaa

SEQ ID NO: 34832 - RNA, 20 nt, synthetic construct
  source 1..20: mol_type = other RNA
gttgttcatggagcatgtac

SEQ ID NO: 34833 - RNA, 20 nt, synthetic construct
  source 1..20: mol_type = other RNA
gtttaagctgcttggggatg

SEQ ID NO: 34834 - RNA, 20 nt, synthetic construct
  source 1..20: mol_type = other RNA
gtttacttcctgatgtataa

SEQ ID NO: 34835 - RNA, 20 nt, synthetic construct
  source 1..20: mol_type = other RNA
gtttctggatccagcccctg

SEQ ID NO: 34836 - RNA, 20 nt, synthetic construct
  source 1..20: mol_type = other RNA
gtttgccagaagcaagatcc

SEQ ID NO: 34837 - RNA, 20 nt, synthetic construct
  source 1..20: mol_type = other RNA
gtttgtttacttcctgatgt

SEQ ID NO: 34838 - RNA, 20 nt, synthetic construct
  source 1..20: mol_type = other RNA
taaacaaacctcttttgggt

SEQ ID NO: 34839 - RNA, 20 nt, synthetic construct
  source 1..20: mol_type = other RNA
taaacttccttgggatcttg

SEQ ID NO: 34840 - RNA, 20 nt, synthetic construct
  source 1..20: mol_type = other RNA
taaagcgattatacatcagg

SEQ ID NO: 34841 - RNA, 20 nt, synthetic construct
  source 1..20: mol_type = other RNA
taagctgcttggggatgacc

SEQ ID NO: 34842 - RNA, 20 nt, synthetic construct
  source 1..20: mol_type = other RNA
taagtttgccagaagcaaga

SEQ ID NO: 34843 - RNA, 20 nt, synthetic construct
  source 1..20: mol_type = other RNA
tacaatggatgtaagtttgc

SEQ ID NO: 34844 - RNA, 20 nt, synthetic construct
  source 1..20: mol_type = other RNA
tacatcaggaagtaaacaaa

SEQ ID NO: 34845 - RNA, 20 nt, synthetic construct
  source 1..20: mol_type = other RNA
tacatccattgtagtacatg

SEQ ID NO: 34846 - RNA, 20 nt, synthetic construct
  source 1..20: mol_type = other RNA
tacatgctccatgaacaacc

SEQ ID NO: 34847 - RNA, 20 nt, synthetic construct
  source 1..20: mol_type = other RNA
tactacaatggatgtaagtt

SEQ ID NO: 34848 - RNA, 20 nt, synthetic construct
  source 1..20: mol_type = other RNA
tacttcctgatgtataatcg

SEQ ID NO: 34849 - RNA, 20 nt, synthetic construct
  source 1..20: mol_type = other RNA
tagcaatgaatttggtcttt

SEQ ID NO: 34850 - RNA, 20 nt, synthetic construct
  source 1..20: mol_type = other RNA
tagtacatgctccatgaaca

SEQ ID NO: 34851 - RNA, 20 nt, synthetic construct
  source 1..20: mol_type = other RNA
tatacatcaggaagtaaaca

SEQ ID NO: 34852 - RNA, 20 nt, synthetic construct
  source 1..20: mol_type = other RNA
tatccatagcaatgaatttg

SEQ ID NO: 34853 - RNA, 20 nt, synthetic construct
  source 1..20: mol_type = other RNA
tcaaaagaccaaattcattg

SEQ ID NO: 34854 - RNA, 20 nt, synthetic construct
  source 1..20: mol_type = other RNA
tcaggaagtaaacaaacctc

SEQ ID NO: 34855 - RNA, 20 nt, synthetic construct
  source 1..20: mol_type = other RNA
tcaggagaacttgcgcctgt

SEQ ID NO: 34856 - RNA, 20 nt, synthetic construct
  source 1..20: mol_type = other RNA
tcaggggctggatccagaaa

SEQ ID NO: 34857 - RNA, 20 nt, synthetic construct
  source 1..20: mol_type = other RNA
tcatccccaagcagcttaaa

SEQ ID NO: 34858 - RNA, 20 nt, synthetic construct
  source 1..20: mol_type = other RNA
tcatggagcatgtactacaa

SEQ ID NO: 34859 - RNA, 20 nt, synthetic construct
  source 1..20: mol_type = other RNA
tccagaaacctgtggtgcct

SEQ ID NO: 34860 - RNA, 20 nt, synthetic construct
  source 1..20: mol_type = other RNA
tccagcccctgacaggcgca

SEQ ID NO: 34861 - RNA, 20 nt, synthetic construct
  source 1..20: mol_type = other RNA
tccatagcaatgaatttggt

SEQ ID NO: 34862 - RNA, 20 nt, synthetic construct
  source 1..20: mol_type = other RNA
tccatgaacaaccaaaagag

SEQ ID NO: 34863 - RNA, 20 nt, synthetic construct
  source 1..20: mol_type = other RNA
tccattgtagtacatgctcc

SEQ ID NO: 34864 - RNA, 20 nt, synthetic construct
  source 1..20: mol_type = other RNA
tcccaaggaagtttaagctg

SEQ ID NO: 34865 - RNA, 20 nt, synthetic construct
  source 1..20: mol_type = other RNA
tccccaagcagcttaaactt

SEQ ID NO: 34866 - RNA, 20 nt, synthetic construct
  source 1..20: mol_type = other RNA
tcctgaaaaatcaaaagacc

SEQ ID NO: 34867 - RNA, 20 nt, synthetic construct
  source 1..20: mol_type = other RNA
tccttctcttttggttgttc

SEQ ID NO: 34868 - RNA, 20 nt, synthetic construct
  source 1..20: mol_type = other RNA
tccttgggatcttgcttctg

SEQ ID NO: 34869 - RNA, 20 nt, synthetic construct
  source 1..20: mol_type = other RNA
tctcctgaaaaatcaaaaga

SEQ ID NO: 34870 - RNA, 20 nt, synthetic construct
  source 1..20: mol_type = other RNA
tctcttttggttgttcatgg

SEQ ID NO: 34871 - RNA, 20 nt, synthetic construct
  source 1..20: mol_type = other RNA
tctggatccagcccctgaca

SEQ ID NO: 34872 - RNA, 20 nt, synthetic construct
  source 1..20: mol_type = other RNA
tctggcaaacttacatccat

SEQ ID NO: 34873 - RNA, 20 nt, synthetic construct
  source 1..20: mol_type = other RNA
tcttgcttctggcaaactta

SEQ ID NO: 34874 - RNA, 20 nt, synthetic construct
  source 1..20: mol_type = other RNA
tcttttgatttttcaggaga

SEQ ID NO: 34875 - RNA, 20 nt, synthetic construct
  source 1..20: mol_type = other RNA
tcttttgggtcatccccaag

SEQ ID NO: 34876 - RNA, 20 nt, synthetic construct
  source 1..20: mol_type = other RNA
tcttttggttgttcatggag

SEQ ID NO: 34877 - RNA, 20 nt, synthetic construct
  source 1..20: mol_type = other RNA
tgaaaaatcaaaagaccaaa

SEQ ID NO: 34878 - RNA, 20 nt, synthetic construct
  source 1..20: mol_type = other RNA
tgaacaaccaaaagagaagg

SEQ ID NO: 34879 - RNA, 20 nt, synthetic construct
  source 1..20: mol_type = other RNA
tgaatttggtcttttgattt

SEQ ID NO: 34880 - RNA, 20 nt, synthetic construct
  source 1..20: mol_type = other RNA
tgacaggcgcaagttctcct

SEQ ID NO: 34881 - RNA, 20 nt, synthetic construct
  source 1..20: mol_type = other RNA
tgacccaaaagaggtttgtt

SEQ ID NO: 34882 - RNA, 20 nt, synthetic construct
  source 1..20: mol_type = other RNA
tgatttttcaggagaacttg

SEQ ID NO: 34883 - RNA, 20 nt, synthetic construct
  source 1..20: mol_type = other RNA
tgccagaagcaagatcccaa

SEQ ID NO: 34884 - RNA, 20 nt, synthetic construct
  source 1..20: mol_type = other RNA
tgcctccttctcttttggtt

SEQ ID NO: 34885 - RNA, 20 nt, synthetic construct
  source 1..20: mol_type = other RNA
tgcgcctgtcaggggctgga

SEQ ID NO: 34886 - RNA, 20 nt, synthetic construct
  source 1..20: mol_type = other RNA
tgctccatgaacaaccaaaa

SEQ ID NO: 34887 - RNA, 20 nt, synthetic construct
  source 1..20: mol_type = other RNA
tgcttctggcaaacttacat

SEQ ID NO: 34888 - RNA, 20 nt, synthetic construct
  source 1..20: mol_type = other RNA
tgcttggggatgacccaaaa

SEQ ID NO: 34889 - RNA, 20 nt, synthetic construct
  source 1..20: mol_type = other RNA
tggagcatgtactacaatgg

SEQ ID NO: 34890 - RNA, 20 nt, synthetic construct
  source 1..20: mol_type = other RNA
tggatccagaaacctgtggt

SEQ ID NO: 34891 - RNA, 20 nt, synthetic construct
  source 1..20: mol_type = other RNA
tggatccagcccctgacagg

SEQ ID NO: 34892 - RNA, 20 nt, synthetic construct
  source 1..20: mol_type = other RNA
tggatgtaagtttgccagaa

SEQ ID NO: 34893 - RNA, 20 nt, synthetic construct
  source 1..20: mol_type = other RNA
tggcaaacttacatccattg

SEQ ID NO: 34894 - RNA, 20 nt, synthetic construct
  source 1..20: mol_type = other RNA
tgggatcttgcttctggcaa

SEQ ID NO: 34895 - RNA, 20 nt, synthetic construct
  source 1..20: mol_type = other RNA
tggggatgacccaaaagagg

SEQ ID NO: 34896 - RNA, 20 nt, synthetic construct
  source 1..20: mol_type = other RNA
tgggtcatccccaagcagct

SEQ ID NO: 34897 - RNA, 20 nt, synthetic construct
  source 1..20: mol_type = other RNA
tggtcttttgatttttcagg

SEQ ID NO: 34898 - RNA, 20 nt, synthetic construct
  source 1..20: mol_type = other RNA
tggtgcctccttctcttttg

SEQ ID NO: 34899 - RNA, 20 nt, synthetic construct
  source 1..20: mol_type = other RNA
tggttgttcatggagcatgt

SEQ ID NO: 34900 - RNA, 20 nt, synthetic construct
  source 1..20: mol_type = other RNA
tgtaagtttgccagaagcaa

SEQ ID NO: 34901 - RNA, 20 nt, synthetic construct
  source 1..20: mol_type = other RNA
tgtactacaatggatgtaag

SEQ ID NO: 34902 - RNA, 20 nt, synthetic construct
  source 1..20: mol_type = other RNA
tgtagtacatgctccatgaa

SEQ ID NO: 34903 - RNA, 20 nt, synthetic construct
  source 1..20: mol_type = other RNA
tgtcaggggctggatccaga

SEQ ID NO: 34904 - RNA, 20 nt, synthetic construct
  source 1..20: mol_type = other RNA
tgtggtgcctccttctcttt

SEQ ID NO: 34905 - RNA, 20 nt, synthetic construct
  source 1..20: mol_type = other RNA
tgttcatggagcatgtacta

SEQ ID NO: 34906 - RNA, 20 nt, synthetic construct
  source 1..20: mol_type = other RNA
tgtttacttcctgatgtata

SEQ ID NO: 34907 - RNA, 20 nt, synthetic construct
  source 1..20: mol_type = other RNA
ttaaacttccttgggatctt

SEQ ID NO: 34908 - RNA, 20 nt, synthetic construct
  source 1..20: mol_type = other RNA
ttaagctgcttggggatgac

SEQ ID NO: 34909 - RNA, 20 nt, synthetic construct
  source 1..20: mol_type = other RNA
ttacatccattgtagtacat

SEQ ID NO: 34910 - RNA, 20 nt, synthetic construct
  source 1..20: mol_type = other RNA
ttacttcctgatgtataatc

SEQ ID NO: 34911 - RNA, 20 nt, synthetic construct
  source 1..20: mol_type = other RNA
ttatacatcaggaagtaaac

SEQ ID NO: 34912 - RNA, 20 nt, synthetic construct
  source 1..20: mol_type = other RNA
ttcaggagaacttgcgcctg

SEQ ID NO: 34913 - RNA, 20 nt, synthetic construct
  source 1..20: mol_type = other RNA
ttcatggagcatgtactaca

SEQ ID NO: 34914 - RNA, 20 nt, synthetic construct
  source 1..20: mol_type = other RNA
ttcctgatgtataatcgctt

SEQ ID NO: 34915 - RNA, 20 nt, synthetic construct
  source 1..20: mol_type = other RNA
ttccttgggatcttgcttct

SEQ ID NO: 34916 - RNA, 20 nt, synthetic construct
  source 1..20: mol_type = other RNA
ttctcctgaaaaatcaaaag

SEQ ID NO: 34917 - RNA, 20 nt, synthetic construct
  source 1..20: mol_type = other RNA
ttctcttttggttgttcatg

SEQ ID NO: 34918 - RNA, 20 nt, synthetic construct
  source 1..20: mol_type = other RNA
ttctggatccagcccctgac

SEQ ID NO: 34919 - RNA, 20 nt, synthetic construct
  source 1..20: mol_type = other RNA
ttctggcaaacttacatcca

SEQ ID NO: 34920 - RNA, 20 nt, synthetic construct
  source 1..20: mol_type = other RNA
ttgatttttcaggagaactt

SEQ ID NO: 34921 - RNA, 20 nt, synthetic construct
  source 1..20: mol_type = other RNA
ttgccagaagcaagatccca

SEQ ID NO: 34922 - RNA, 20 nt, synthetic construct
  source 1..20: mol_type = other RNA
ttgcgcctgtcaggggctgg

SEQ ID NO: 34923 - RNA, 20 nt, synthetic construct
  source 1..20: mol_type = other RNA
ttgcttctggcaaacttaca

SEQ ID NO: 34924 - RNA, 20 nt, synthetic construct
  source 1..20: mol_type = other RNA
ttgggatcttgcttctggca

SEQ ID NO: 34925 - RNA, 20 nt, synthetic construct
  source 1..20: mol_type = other RNA
ttggggatgacccaaaagag

SEQ ID NO: 34926 - RNA, 20 nt, synthetic construct
  source 1..20: mol_type = other RNA
ttgggtcatccccaagcagc

SEQ ID NO: 34927 - RNA, 20 nt, synthetic construct
  source 1..20: mol_type = other RNA
ttggtcttttgatttttcag

SEQ ID NO: 34928 - RNA, 20 nt, synthetic construct
  source 1..20: mol_type = other RNA
ttggttgttcatggagcatg

SEQ ID NO: 34929 - RNA, 20 nt, synthetic construct
  source 1..20: mol_type = other RNA
ttgtagtacatgctccatga

SEQ ID NO: 34930 - RNA, 20 nt, synthetic construct
  source 1..20: mol_type = other RNA
ttgttcatggagcatgtact

SEQ ID NO: 34931 - RNA, 20 nt, synthetic construct
  source 1..20: mol_type = other RNA
ttgtttacttcctgatgtat

SEQ ID NO: 34932 - RNA, 20 nt, synthetic construct
  source 1..20: mol_type = other RNA
tttaagctgcttggggatga

SEQ ID NO: 34933 - RNA, 20 nt, synthetic construct
  source 1..20: mol_type = other RNA
tttacttcctgatgtataat

SEQ ID NO: 34934 - RNA, 20 nt, synthetic construct
  source 1..20: mol_type = other RNA
tttcaggagaacttgcgcct

SEQ ID NO: 34935 - RNA, 20 nt, synthetic construct
  source 1..20: mol_type = other RNA
tttctggatccagcccctga

SEQ ID NO: 34936 - RNA, 20 nt, synthetic construct
  source 1..20: mol_type = other RNA
tttgatttttcaggagaact

SEQ ID NO: 34937 - RNA, 20 nt, synthetic construct
  source 1..20: mol_type = other RNA
tttgccagaagcaagatccc

SEQ ID NO: 34938 - RNA, 20 nt, synthetic construct
  source 1..20: mol_type = other RNA
tttgggtcatccccaagcag

SEQ ID NO: 34939 - RNA, 20 nt, synthetic construct
  source 1..20: mol_type = other RNA
tttggtcttttgatttttca

SEQ ID NO: 34940 - RNA, 20 nt, synthetic construct
  source 1..20: mol_type = other RNA
tttggttgttcatggagcat

SEQ ID NO: 34941 - RNA, 20 nt, synthetic construct
  source 1..20: mol_type = other RNA
tttgtttacttcctgatgta

SEQ ID NO: 34942 - RNA, 20 nt, synthetic construct
  source 1..20: mol_type = other RNA
ttttcaggagaacttgcgcc

SEQ ID NO: 34943 - RNA, 20 nt, synthetic construct
  source 1..20: mol_type = other RNA
ttttgatttttcaggagaac

SEQ ID NO: 34944 - RNA, 20 nt, synthetic construct
  source 1..20: mol_type = other RNA
ttttgggtcatccccaagca

SEQ ID NO: 34945 - RNA, 20 nt, synthetic construct
  source 1..20: mol_type = other RNA
ttttggttgttcatggagca

SEQ ID NO: 34946 - RNA, 20 nt, synthetic construct
  source 1..20: mol_type = other RNA
tttttcaggagaacttgcgc

SEQ ID NO: 34947 - RNA, 21 nt, synthetic construct
  source 1..21: mol_type = other RNA
aaaagaccaaattcattgcta

SEQ ID NO: 34948 - RNA, 21 nt, synthetic construct
  source 1..21: mol_type = other RNA
aaaagagaaggaggcaccaca

SEQ ID NO: 34949 - RNA, 21 nt, synthetic construct
  source 1..21: mol_type = other RNA
aaaagaggtttgtttacttcc

SEQ ID NO: 34950 - RNA, 21 nt, synthetic construct
  source 1..21: mol_type = other RNA
aaacaaacctcttttgggtca

SEQ ID NO: 34951 - RNA, 21 nt, synthetic construct
  source 1..21: mol_type = other RNA
aaacctcttttgggtcatccc

SEQ ID NO: 34952 - RNA, 21 nt, synthetic construct
  source 1..21: mol_type = other RNA
aaacctgtggtgcctccttct

SEQ ID NO: 34953 - RNA, 21 nt, synthetic construct
  source 1..21: mol_type = other RNA
aaacttacatccattgtagta

SEQ ID NO: 34954 - RNA, 21 nt, synthetic construct
  source 1..21: mol_type = other RNA
aaacttccttgggatcttgct

SEQ ID NO: 34955 - RNA, 21 nt, synthetic construct
  source 1..21: mol_type = other RNA
aaagagaaggaggcaccacag

SEQ ID NO: 34956 - RNA, 21 nt, synthetic construct
  source 1..21: mol_type = other RNA
aaagaggtttgtttacttcct

SEQ ID NO: 34957 - RNA, 21 nt, synthetic construct
  source 1..21: mol_type = other RNA
aaagcgattatacatcaggaa

SEQ ID NO: 34958 - RNA, 21 nt, synthetic construct
  source 1..21: mol_type = other RNA
aacaaacctcttttgggtcat

SEQ ID NO: 34959 - RNA, 21 nt, synthetic construct
  source 1..21: mol_type = other RNA
aacaaccaaaagagaaggagg

SEQ ID NO: 34960 - RNA, 21 nt, synthetic construct
  source 1..21: mol_type = other RNA
aaccaaaagagaaggaggcac

SEQ ID NO: 34961 - RNA, 21 nt, synthetic construct
  source 1..21: mol_type = other RNA
aacctcttttgggtcatcccc

SEQ ID NO: 34962 - RNA, 21 nt, synthetic construct
  source 1..21: mol_type = other RNA
aacctgtggtgcctccttctc

SEQ ID NO: 34963 - RNA, 21 nt, synthetic construct
  source 1..21: mol_type = other RNA
aacttacatccattgtagtac

SEQ ID NO: 34964 - RNA, 21 nt, synthetic construct
  source 1..21: mol_type = other RNA
aacttccttgggatcttgctt

SEQ ID NO: 34965 - RNA, 21 nt, synthetic construct
  source 1..21: mol_type = other RNA
aacttgcgcctgtcaggggct

SEQ ID NO: 34966 - RNA, 21 nt, synthetic construct
  source 1..21: mol_type = other RNA
aagagaaggaggcaccacagg

SEQ ID NO: 34967 - RNA, 21 nt, synthetic construct
  source 1..21: mol_type = other RNA
aagaggtttgtttacttcctg

SEQ ID NO: 34968 - RNA, 21 nt, synthetic construct
  source 1..21: mol_type = other RNA
aagatcccaaggaagtttaag

SEQ ID NO: 34969 - RNA, 21 nt, synthetic construct
  source 1..21: mol_type = other RNA
aagcaagatcccaaggaagtt

SEQ ID NO: 34970 - RNA, 21 nt, synthetic construct
  source 1..21: mol_type = other RNA
aagcagcttaaacttccttgg

SEQ ID NO: 34971 - RNA, 21 nt, synthetic construct
  source 1..21: mol_type = other RNA
aagcgattatacatcaggaag

SEQ ID NO: 34972 - RNA, 21 nt, synthetic construct
  source 1..21: mol_type = other RNA
aagctgcttggggatgaccca

SEQ ID NO: 34973 - RNA, 21 nt, synthetic construct
  source 1..21: mol_type = other RNA
aaggaagtttaagctgcttgg

SEQ ID NO: 34974 - RNA, 21 nt, synthetic construct
  source 1..21: mol_type = other RNA
aaggaggcaccacaggtttct

SEQ ID NO: 34975 - RNA, 21 nt, synthetic construct
  source 1..21: mol_type = other RNA
aagtaaacaaacctcttttgg

SEQ ID NO: 34976 - RNA, 21 nt, synthetic construct
  source 1..21: mol_type = other RNA
aagttctcctgaaaaatcaaa

SEQ ID NO: 34977 - RNA, 21 nt, synthetic construct
  source 1..21: mol_type = other RNA
aagtttaagctgcttggggat

SEQ ID NO: 34978 - RNA, 21 nt, synthetic construct
  source 1..21: mol_type = other RNA
aagtttgccagaagcaagatc

SEQ ID NO: 34979 - RNA, 21 nt, synthetic construct
  source 1..21: mol_type = other RNA
aataaagcgattatacatcag

SEQ ID NO: 34980 - RNA, 21 nt, synthetic construct
  source 1..21: mol_type = other RNA
aatggatgtaagtttgccaga

SEQ ID NO: 34981 - RNA, 21 nt, synthetic construct
  source 1..21: mol_type = other RNA
acaaacctcttttgggtcatc

SEQ ID NO: 34982 - RNA, 21 nt, synthetic construct
  source 1..21: mol_type = other RNA
acaaccaaaagagaaggaggc

SEQ ID NO: 34983 - RNA, 21 nt, synthetic construct
  source 1..21: mol_type = other RNA
acaatggatgtaagtttgcca

SEQ ID NO: 34984 - RNA, 21 nt, synthetic construct
  source 1..21: mol_type = other RNA
acaggcgcaagttctcctgaa

SEQ ID NO: 34985 - RNA, 21 nt, synthetic construct
  source 1..21: mol_type = other RNA
acaggtttctggatccagccc

SEQ ID NO: 34986 - RNA, 21 nt, synthetic construct
  source 1..21: mol_type = other RNA
acatcaggaagtaaacaaacc

SEQ ID NO: 34987 - RNA, 21 nt, synthetic construct
  source 1..21: mol_type = other RNA
acatccattgtagtacatgct

SEQ ID NO: 34988 - RNA, 21 nt, synthetic construct
  source 1..21: mol_type = other RNA
acatgctccatgaacaaccaa

SEQ ID NO: 34989 - RNA, 21 nt, synthetic construct
  source 1..21: mol_type = other RNA
accaaaagagaaggaggcacc

SEQ ID NO: 34990 - RNA, 21 nt, synthetic construct
  source 1..21: mol_type = other RNA
accacaggtttctggatccag

SEQ ID NO: 34991 - RNA, 21 nt, synthetic construct
  source 1..21: mol_type = other RNA
acccaaaagaggtttgtttac

SEQ ID NO: 34992 - RNA, 21 nt, synthetic construct
  source 1..21: mol_type = other RNA
acctcttttgggtcatcccca

SEQ ID NO: 34993 - RNA, 21 nt, synthetic construct
  source 1..21: mol_type = other RNA
acctgtggtgcctccttctct

SEQ ID NO: 34994 - RNA, 21 nt, synthetic construct
  source 1..21: mol_type = other RNA
actacaatggatgtaagtttg

SEQ ID NO: 34995 - RNA, 21 nt, synthetic construct
  source 1..21: mol_type = other RNA
acttacatccattgtagtaca

SEQ ID NO: 34996 - RNA, 21 nt, synthetic construct
  source 1..21: mol_type = other RNA
acttcctgatgtataatcgct

SEQ ID NO: 34997 - RNA, 21 nt, synthetic construct
  source 1..21: mol_type = other RNA
acttccttgggatcttgcttc

SEQ ID NO: 34998 - RNA, 21 nt, synthetic construct
  source 1..21: mol_type = other RNA
acttgcgcctgtcaggggctg

SEQ ID NO: 34999 - RNA, 21 nt, synthetic construct
  source 1..21: mol_type = other RNA
agaaacctgtggtgcctcctt

SEQ ID NO: 35000 - RNA, 21 nt, synthetic construct
  source 1..21: mol_type = other RNA
agaacttgcgcctgtcagggg

SEQ ID NO: 35001 - RNA, 21 nt, synthetic construct
  source 1..21: mol_type = other RNA
agaagcaagatcccaaggaag

SEQ ID NO: 35002 - RNA, 21 nt, synthetic construct
  source 1..21: mol_type = other RNA
agaaggaggcaccacaggttt

SEQ ID NO: 35003 - RNA, 21 nt, synthetic construct
  source 1..21: mol_type = other RNA
agagaaggaggcaccacaggt

SEQ ID NO: 35004 - RNA, 21 nt, synthetic construct
  source 1..21: mol_type = other RNA
agaggtttgtttacttcctga

SEQ ID NO: 35005 - RNA, 21 nt, synthetic construct
  source 1..21: mol_type = other RNA
agatcccaaggaagtttaagc

SEQ ID NO: 35006 - RNA, 21 nt, synthetic construct
  source 1..21: mol_type = other RNA
agcaagatcccaaggaagttt

SEQ ID NO: 35007 - RNA, 21 nt, synthetic construct
  source 1..21: mol_type = other RNA
agcaatgaatttggtcttttg

SEQ ID NO: 35008 - RNA, 21 nt, synthetic construct
  source 1..21: mol_type = other RNA
agcagcttaaacttccttggg

SEQ ID NO: 35009 - RNA, 21 nt, synthetic construct
  source 1..21: mol_type = other RNA
agcatgtactacaatggatgt

SEQ ID NO: 35010 - RNA, 21 nt, synthetic construct
  source 1..21: mol_type = other RNA
agcccctgacaggcgcaagtt

SEQ ID NO: 35011 - RNA, 21 nt, synthetic construct
  source 1..21: mol_type = other RNA
agcgattatacatcaggaagt

SEQ ID NO: 35012 - RNA, 21 nt, synthetic construct
  source 1..21: mol_type = other RNA
agctgcttggggatgacccaa

SEQ ID NO: 35013 - RNA, 21 nt, synthetic construct
  source 1..21: mol_type = other RNA
agcttaaacttccttgggatc

SEQ ID NO: 35014 - RNA, 21 nt, synthetic construct
  source 1..21: mol_type = other RNA
aggaagtaaacaaacctcttt

SEQ ID NO: 35015 - RNA, 21 nt, synthetic construct
  source 1..21: mol_type = other RNA
aggaagtttaagctgcttggg

SEQ ID NO: 35016 - RNA, 21 nt, synthetic construct
  source 1..21: mol_type = other RNA
aggagaacttgcgcctgtcag

SEQ ID NO: 35017 - RNA, 21 nt, synthetic construct
  source 1..21: mol_type = other RNA
aggaggcaccacaggtttctg

SEQ ID NO: 35018 - RNA, 21 nt, synthetic construct
  source 1..21: mol_type = other RNA
aggcaccacaggtttctggat

SEQ ID NO: 35019 - RNA, 21 nt, synthetic construct
  source 1..21: mol_type = other RNA
aggcgcaagttctcctgaaaa

SEQ ID NO: 35020 - RNA, 21 nt, synthetic construct
  source 1..21: mol_type = other RNA
aggggctggatccagaaacct

SEQ ID NO: 35021 - RNA, 21 nt, synthetic construct
  source 1..21: mol_type = other RNA
aggtttctggatccagcccct

SEQ ID NO: 35022 - RNA, 21 nt, synthetic construct
  source 1..21: mol_type = other RNA
aggtttgtttacttcctgatg

SEQ ID NO: 35023 - RNA, 21 nt, synthetic construct
  source 1..21: mol_type = other RNA
agtaaacaaacctcttttggg

SEQ ID NO: 35024 - RNA, 21 nt, synthetic construct
  source 1..21: mol_type = other RNA
agtacatgctccatgaacaac

SEQ ID NO: 35025 - RNA, 21 nt, synthetic construct
  source 1..21: mol_type = other RNA
agttctcctgaaaaatcaaaa

SEQ ID NO: 35026 - RNA, 21 nt, synthetic construct
  source 1..21: mol_type = other RNA
agtttaagctgcttggggatg

SEQ ID NO: 35027 - RNA, 21 nt, synthetic construct
  source 1..21: mol_type = other RNA
agtttgccagaagcaagatcc

SEQ ID NO: 35028 - RNA, 21 nt, synthetic construct
  source 1..21: mol_type = other RNA
ataaagcgattatacatcagg

SEQ ID NO: 35029 - RNA, 21 nt, synthetic construct
  source 1..21: mol_type = other RNA
atacatcaggaagtaaacaaa

SEQ ID NO: 35030 - RNA, 21 nt, synthetic construct
  source 1..21: mol_type = other RNA
atagcaatgaatttggtcttt

SEQ ID NO: 35031 - RNA, 21 nt, synthetic construct
  source 1..21: mol_type = other RNA
atcaaaagaccaaattcattg

SEQ ID NO: 35032 - RNA, 21 nt, synthetic construct
  source 1..21: mol_type = other RNA
atcaggaagtaaacaaacctc

SEQ ID NO: 35033 - RNA, 21 nt, synthetic construct
  source 1..21: mol_type = other RNA
atccagaaacctgtggtgcct

SEQ ID NO: 35034 - RNA, 21 nt, synthetic construct
  source 1..21: mol_type = other RNA
atccagcccctgacaggcgca

SEQ ID NO: 35035 - RNA, 21 nt, synthetic construct
  source 1..21: mol_type = other RNA
atccatagcaatgaatttggt

SEQ ID NO: 35036 - RNA, 21 nt, synthetic construct
  source 1..21: mol_type = other RNA
atccattgtagtacatgctcc

SEQ ID NO: 35037 - RNA, 21 nt, synthetic construct
  source 1..21: mol_type = other RNA
atcccaaggaagtttaagctg

SEQ ID NO: 35038 - RNA, 21 nt, synthetic construct
  source 1..21: mol_type = other RNA
atccccaagcagcttaaactt

SEQ ID NO: 35039 - RNA, 21 nt, synthetic construct
  source 1..21: mol_type = other RNA
atcttgcttctggcaaactta

SEQ ID NO: 35040 - RNA, 21 nt, synthetic construct
  source 1..21: mol_type = other RNA
atgaacaaccaaaagagaagg

SEQ ID NO: 35041 - RNA, 21 nt, synthetic construct
  source 1..21: mol_type = other RNA
atgacccaaaagaggtttgtt

SEQ ID NO: 35042 - RNA, 21 nt, synthetic construct
  source 1..21: mol_type = other RNA
atgctccatgaacaaccaaaa

SEQ ID NO: 35043 - RNA, 21 nt, synthetic construct
  source 1..21: mol_type = other RNA
atggagcatgtactacaatgg

SEQ ID NO: 35044 - RNA, 21 nt, synthetic construct
  source 1..21: mol_type = other RNA
atggatgtaagtttgccagaa

SEQ ID NO: 35045 - RNA, 21 nt, synthetic construct
  source 1..21: mol_type = other RNA
atgtaagtttgccagaagcaa

SEQ ID NO: 35046 - RNA, 21 nt, synthetic construct
  source 1..21: mol_type = other RNA
atgtactacaatggatgtaag

SEQ ID NO: 35047 - RNA, 21 nt, synthetic construct
  source 1..21: mol_type = other RNA
attatacatcaggaagtaaac

SEQ ID NO: 35048 - RNA, 21 nt, synthetic construct
  source 1..21: mol_type = other RNA
attgtagtacatgctccatga

SEQ ID NO: 35049 - RNA, 21 nt, synthetic construct
  source 1..21: mol_type = other RNA
atttttcaggagaacttgcgc

SEQ ID NO: 35050 - RNA, 21 nt, synthetic construct
  source 1..21: mol_type = other RNA
caaaagaccaaattcattgct

SEQ ID NO: 35051 - RNA, 21 nt, synthetic construct
  source 1..21: mol_type = other RNA
caaaagagaaggaggcaccac

SEQ ID NO: 35052 - RNA, 21 nt, synthetic construct
  source 1..21: mol_type = other RNA
caaaagaggtttgtttacttc

SEQ ID NO: 35053 - RNA, 21 nt, synthetic construct
  source 1..21: mol_type = other RNA
caaacctcttttgggtcatcc

SEQ ID NO: 35054 - RNA, 21 nt, synthetic construct
  source 1..21: mol_type = other RNA
caaacttacatccattgtagt

SEQ ID NO: 35055 - RNA, 21 nt, synthetic construct
  source 1..21: mol_type = other RNA
caaccaaaagagaaggaggca

SEQ ID NO: 35056 - RNA, 21 nt, synthetic construct
  source 1..21: mol_type = other RNA
caagatcccaaggaagtttaa

SEQ ID NO: 35057 - RNA, 21 nt, synthetic construct
  source 1..21: mol_type = other RNA
caagcagcttaaacttccttg

SEQ ID NO: 35058 - RNA, 21 nt, synthetic construct
  source 1..21: mol_type = other RNA
caaggaagtttaagctgcttg

SEQ ID NO: 35059 - RNA, 21 nt, synthetic construct
  source 1..21: mol_type = other RNA
caagttctcctgaaaaatcaa

SEQ ID NO: 35060 - RNA, 21 nt, synthetic construct
  source 1..21: mol_type = other RNA
caatgaatttggtcttttgat

SEQ ID NO: 35061 - RNA, 21 nt, synthetic construct
  source 1..21: mol_type = other RNA
caatggatgtaagtttgccag

SEQ ID NO: 35062 - RNA, 21 nt, synthetic construct
  source 1..21: mol_type = other RNA
cacaggtttctggatccagcc

SEQ ID NO: 35063 - RNA, 21 nt, synthetic construct
  source 1..21: mol_type = other RNA
caccacaggtttctggatcca

SEQ ID NO: 35064 - RNA, 21 nt, synthetic construct
  source 1..21: mol_type = other RNA
cagaaacctgtggtgcctcct

SEQ ID NO: 35065 - RNA, 21 nt, synthetic construct
  source 1..21: mol_type = other RNA
cagaagcaagatcccaaggaa

SEQ ID NO: 35066 - RNA, 21 nt, synthetic construct
  source 1..21: mol_type = other RNA
cagcccctgacaggcgcaagt

SEQ ID NO: 35067 - RNA, 21 nt, synthetic construct
  source 1..21: mol_type = other RNA
cagcttaaacttccttgggat

SEQ ID NO: 35068 - RNA, 21 nt, synthetic construct
  source 1..21: mol_type = other RNA
caggaagtaaacaaacctctt

SEQ ID NO: 35069 - RNA, 21 nt, synthetic construct
  source 1..21: mol_type = other RNA
caggagaacttgcgcctgtca

SEQ ID NO: 35070 - RNA, 21 nt, synthetic construct
  source 1..21: mol_type = other RNA
caggcgcaagttctcctgaaa

SEQ ID NO: 35071 - RNA, 21 nt, synthetic construct
  source 1..21: mol_type = other RNA
caggggctggatccagaaacc

SEQ ID NO: 35072 - RNA, 21 nt, synthetic construct
  source 1..21: mol_type = other RNA
caggtttctggatccagcccc

SEQ ID NO: 35073 - RNA, 21 nt, synthetic construct
  source 1..21: mol_type = other RNA
catagcaatgaatttggtctt

SEQ ID NO: 35074 - RNA, 21 nt, synthetic construct
  source 1..21: mol_type = other RNA
catcaggaagtaaacaaacct

SEQ ID NO: 35075 - RNA, 21 nt, synthetic construct
  source 1..21: mol_type = other RNA
catccattgtagtacatgctc

SEQ ID NO: 35076 - RNA, 21 nt, synthetic construct
  source 1..21: mol_type = other RNA
catccccaagcagcttaaact

SEQ ID NO: 35077 - RNA, 21 nt, synthetic construct
  source 1..21: mol_type = other RNA
catgaacaaccaaaagagaag

SEQ ID NO: 35078 - RNA, 21 nt, synthetic construct
  source 1..21: mol_type = other RNA
catgctccatgaacaaccaaa

SEQ ID NO: 35079 - RNA, 21 nt, synthetic construct
  source 1..21: mol_type = other RNA
catggagcatgtactacaatg

SEQ ID NO: 35080 - RNA, 21 nt, synthetic construct
  source 1..21: mol_type = other RNA
catgtactacaatggatgtaa

SEQ ID NO: 35081 - RNA, 21 nt, synthetic construct
  source 1..21: mol_type = other RNA
cattgtagtacatgctccatg

SEQ ID NO: 35082 - RNA, 21 nt, synthetic construct
  source 1..21: mol_type = other RNA
ccaaaagagaaggaggcacca

SEQ ID NO: 35083 - RNA, 21 nt, synthetic construct
  source 1..21: mol_type = other RNA
ccaaaagaggtttgtttactt

SEQ ID NO: 35084 - RNA, 21 nt, synthetic construct
  source 1..21: mol_type = other RNA
ccaagcagcttaaacttcctt

SEQ ID NO: 35085 - RNA, 21 nt, synthetic construct
  source 1..21: mol_type = other RNA
ccaaggaagtttaagctgctt

SEQ ID NO: 35086 - RNA, 21 nt, synthetic construct
  source 1..21: mol_type = other RNA
ccacaggtttctggatccagc

SEQ ID NO: 35087 - RNA, 21 nt, synthetic construct
  source 1..21: mol_type = other RNA
ccagaaacctgtggtgcctcc

SEQ ID NO: 35088 - RNA, 21 nt, synthetic construct
  source 1..21: mol_type = other RNA
ccagaagcaagatcccaagga

SEQ ID NO: 35089 - RNA, 21 nt, synthetic construct
  source 1..21: mol_type = other RNA
ccagcccctgacaggcgcaag

SEQ ID NO: 35090 - RNA, 21 nt, synthetic construct
  source 1..21: mol_type = other RNA
ccatagcaatgaatttggtct

SEQ ID NO: 35091 - RNA, 21 nt, synthetic construct
  source 1..21: mol_type = other RNA
ccatgaacaaccaaaagagaa

SEQ ID NO: 35092 - RNA, 21 nt, synthetic construct
  source 1..21: mol_type = other RNA
ccattgtagtacatgctccat

SEQ ID NO: 35093 - RNA, 21 nt, synthetic construct
  source 1..21: mol_type = other RNA
cccaaaagaggtttgtttact

SEQ ID NO: 35094 - RNA, 21 nt, synthetic construct
  source 1..21: mol_type = other RNA
cccaagcagcttaaacttcct

SEQ ID NO: 35095 - RNA, 21 nt, synthetic construct
  source 1..21: mol_type = other RNA
cccaaggaagtttaagctgct

SEQ ID NO: 35096 - RNA, 21 nt, synthetic construct
  source 1..21: mol_type = other RNA
ccccaagcagcttaaacttcc

SEQ ID NO: 35097 - RNA, 21 nt, synthetic construct
  source 1..21: mol_type = other RNA
cccctgacaggcgcaagttct

SEQ ID NO: 35098 - RNA, 21 nt, synthetic construct
  source 1..21: mol_type = other RNA
ccctgacaggcgcaagttctc

SEQ ID NO: 35099 - RNA, 21 nt, synthetic construct
  source 1..21: mol_type = other RNA
cctccttctcttttggttgtt

SEQ ID NO: 35100 - RNA, 21 nt, synthetic construct
  source 1..21: mol_type = other RNA
cctcttttgggtcatccccaa

SEQ ID NO: 35101 - RNA, 21 nt, synthetic construct
  source 1..21: mol_type = other RNA
cctgaaaaatcaaaagaccaa

SEQ ID NO: 35102 - RNA, 21 nt, synthetic construct
  source 1..21: mol_type = other RNA
cctgacaggcgcaagttctcc

SEQ ID NO: 35103 - RNA, 21 nt, synthetic construct
  source 1..21: mol_type = other RNA
cctgtcaggggctggatccag

SEQ ID NO: 35104 - RNA, 21 nt, synthetic construct
  source 1..21: mol_type = other RNA
cctgtggtgcctccttctctt

SEQ ID NO: 35105 - RNA, 21 nt, synthetic construct
  source 1..21: mol_type = other RNA
ccttctcttttggttgttcat

SEQ ID NO: 35106 - RNA, 21 nt, synthetic construct
  source 1..21: mol_type = other RNA
ccttgggatcttgcttctggc

SEQ ID NO: 35107 - RNA, 21 nt, synthetic construct
  source 1..21: mol_type = other RNA
cgattatacatcaggaagtaa

SEQ ID NO: 35108 - RNA, 21 nt, synthetic construct
  source 1..21: mol_type = other RNA
cgcaagttctcctgaaaaatc

SEQ ID NO: 35109 - RNA, 21 nt, synthetic construct
  source 1..21: mol_type = other RNA
cgcctgtcaggggctggatcc

SEQ ID NO: 35110 - RNA, 21 nt, synthetic construct
  source 1..21: mol_type = other RNA
ctacaatggatgtaagtttgc

SEQ ID NO: 35111 - RNA, 21 nt, synthetic construct
  source 1..21: mol_type = other RNA
ctatccatagcaatgaatttg

SEQ ID NO: 35112 - RNA, 21 nt, synthetic construct
  source 1..21: mol_type = other RNA
ctccatgaacaaccaaaagag

SEQ ID NO: 35113 - RNA, 21 nt, synthetic construct
  source 1..21: mol_type = other RNA
ctcctgaaaaatcaaaagacc

SEQ ID NO: 35114 - RNA, 21 nt, synthetic construct
  source 1..21: mol_type = other RNA
ctccttctcttttggttgttc

SEQ ID NO: 35115 - RNA, 21 nt, synthetic construct
  source 1..21: mol_type = other RNA
ctcttttgggtcatccccaag

SEQ ID NO: 35116 - RNA, 21 nt, synthetic construct
  source 1..21: mol_type = other RNA
ctcttttggttgttcatggag

SEQ ID NO: 35117 - RNA, 21 nt, synthetic construct
  source 1..21: mol_type = other RNA
ctgaaaaatcaaaagaccaaa

SEQ ID NO: 35118 - RNA, 21 nt, synthetic construct
  source 1..21: mol_type = other RNA
ctgacaggcgcaagttctcct

SEQ ID NO: 35119 - RNA, 21 nt, synthetic construct
  source 1..21: mol_type = other RNA
ctgcttggggatgacccaaaa

SEQ ID NO: 35120 - RNA, 21 nt, synthetic construct
  source 1..21: mol_type = other RNA
ctggatccagaaacctgtggt

SEQ ID NO: 35121 - RNA, 21 nt, synthetic construct
  source 1..21: mol_type = other RNA
ctggatccagcccctgacagg

SEQ ID NO: 35122 - RNA, 21 nt, synthetic construct
  source 1..21: mol_type = other RNA
ctggcaaacttacatccattg

SEQ ID NO: 35123 - RNA, 21 nt, synthetic construct
  source 1..21: mol_type = other RNA
ctgtcaggggctggatccaga

SEQ ID NO: 35124 - RNA, 21 nt, synthetic construct
  source 1..21: mol_type = other RNA
ctgtggtgcctccttctcttt

SEQ ID NO: 35125 - RNA, 21 nt, synthetic construct
  source 1..21: mol_type = other RNA
cttaaacttccttgggatctt

SEQ ID NO: 35126 - RNA, 21 nt, synthetic construct
  source 1..21: mol_type = other RNA
cttacatccattgtagtacat

SEQ ID NO: 35127 - RNA, 21 nt, synthetic construct
  source 1..21: mol_type = other RNA
cttcctgatgtataatcgctt

SEQ ID NO: 35128 - RNA, 21 nt, synthetic construct
  source 1..21: mol_type = other RNA
cttccttgggatcttgcttct

SEQ ID NO: 35129 - RNA, 21 nt, synthetic construct
  source 1..21: mol_type = other RNA
cttctcttttggttgttcatg

SEQ ID NO: 35130 - RNA, 21 nt, synthetic construct
  source 1..21: mol_type = other RNA
cttctggcaaacttacatcca

SEQ ID NO: 35131 - RNA, 21 nt, synthetic construct
  source 1..21: mol_type = other RNA
cttgcgcctgtcaggggctgg

SEQ ID NO: 35132 - RNA, 21 nt, synthetic construct
  source 1..21: mol_type = other RNA
cttgcttctggcaaacttaca

SEQ ID NO: 35133 - RNA, 21 nt, synthetic construct
  source 1..21: mol_type = other RNA
cttgggatcttgcttctggca

SEQ ID NO: 35134 - RNA, 21 nt, synthetic construct
  source 1..21: mol_type = other RNA
cttggggatgacccaaaagag

SEQ ID NO: 35135 - RNA, 21 nt, synthetic construct
  source 1..21: mol_type = other RNA
cttttgatttttcaggagaac

SEQ ID NO: 35136 - RNA, 21 nt, synthetic construct
  source 1..21: mol_type = other RNA
cttttgggtcatccccaagca

SEQ ID NO: 35137 - RNA, 21 nt, synthetic construct
  source 1..21: mol_type = other RNA
cttttggttgttcatggagca

SEQ ID NO: 35138 - RNA, 21 nt, synthetic construct
  source 1..21: mol_type = other RNA
gaaacctgtggtgcctccttc

SEQ ID NO: 35139 - RNA, 21 nt, synthetic construct
  source 1..21: mol_type = other RNA
gaacaaccaaaagagaaggag

SEQ ID NO: 35140 - RNA, 21 nt, synthetic construct
  source 1..21: mol_type = other RNA
gaacttgcgcctgtcaggggc

SEQ ID NO: 35141 - RNA, 21 nt, synthetic construct
  source 1..21: mol_type = other RNA
gaagcaagatcccaaggaagt

SEQ ID NO: 35142 - RNA, 21 nt, synthetic construct
  source 1..21: mol_type = other RNA
gaaggaggcaccacaggtttc

SEQ ID NO: 35143 - RNA, 21 nt, synthetic construct
  source 1..21: mol_type = other RNA
gaagtaaacaaacctcttttg

SEQ ID NO: 35144 - RNA, 21 nt, synthetic construct
  source 1..21: mol_type = other RNA
gaagtttaagctgcttgggga

SEQ ID NO: 35145 - RNA, 21 nt, synthetic construct
  source 1..21: mol_type = other RNA
gacaggcgcaagttctcctga

SEQ ID NO: 35146 - RNA, 21 nt, synthetic construct
  source 1..21: mol_type = other RNA
gacccaaaagaggtttgttta

SEQ ID NO: 35147 - RNA, 21 nt, synthetic construct
  source 1..21: mol_type = other RNA
gagaacttgcgcctgtcaggg

SEQ ID NO: 35148 - RNA, 21 nt, synthetic construct
  source 1..21: mol_type = other RNA
gagaaggaggcaccacaggtt

SEQ ID NO: 35149 - RNA, 21 nt, synthetic construct
  source 1..21: mol_type = other RNA
gagcatgtactacaatggatg

SEQ ID NO: 35150 - RNA, 21 nt, synthetic construct
  source 1..21: mol_type = other RNA
gaggcaccacaggtttctgga

SEQ ID NO: 35151 - RNA, 21 nt, synthetic construct
  source 1..21: mol_type = other RNA
gaggtttgtttacttcctgat

SEQ ID NO: 35152 - RNA, 21 nt, synthetic construct
  source 1..21: mol_type = other RNA
gatccagaaacctgtggtgcc

SEQ ID NO: 35153 - RNA, 21 nt, synthetic construct
  source 1..21: mol_type = other RNA
gatccagcccctgacaggcgc

SEQ ID NO: 35154 - RNA, 21 nt, synthetic construct
  source 1..21: mol_type = other RNA
gatcccaaggaagtttaagct

SEQ ID NO: 35155 - RNA, 21 nt, synthetic construct
  source 1..21: mol_type = other RNA
gatcttgcttctggcaaactt

SEQ ID NO: 35156 - RNA, 21 nt, synthetic construct
  source 1..21: mol_type = other RNA
gatgacccaaaagaggtttgt

SEQ ID NO: 35157 - RNA, 21 nt, synthetic construct
  source 1..21: mol_type = other RNA
gatgtaagtttgccagaagca

SEQ ID NO: 35158 - RNA, 21 nt, synthetic construct
  source 1..21: mol_type = other RNA
gattatacatcaggaagtaaa

SEQ ID NO: 35159 - RNA, 21 nt, synthetic construct
  source 1..21: mol_type = other RNA
gatttttcaggagaacttgcg

SEQ ID NO: 35160 - RNA, 21 nt, synthetic construct
  source 1..21: mol_type = other RNA
gcaaacttacatccattgtag

SEQ ID NO: 35161 - RNA, 21 nt, synthetic construct
  source 1..21: mol_type = other RNA
gcaagatcccaaggaagttta

SEQ ID NO: 35162 - RNA, 21 nt, synthetic construct
  source 1..21: mol_type = other RNA
gcaagttctcctgaaaaatca

SEQ ID NO: 35163 - RNA, 21 nt, synthetic construct
  source 1..21: mol_type = other RNA
gcaatgaatttggtcttttga

SEQ ID NO: 35164 - RNA, 21 nt, synthetic construct
  source 1..21: mol_type = other RNA
gcaccacaggtttctggatcc

SEQ ID NO: 35165 - RNA, 21 nt, synthetic construct
  source 1..21: mol_type = other RNA
gcagcttaaacttccttggga

SEQ ID NO: 35166 - RNA, 21 nt, synthetic construct
  source 1..21: mol_type = other RNA
gcatgtactacaatggatgta

SEQ ID NO: 35167 - RNA, 21 nt, synthetic construct
  source 1..21: mol_type = other RNA
gccagaagcaagatcccaagg

SEQ ID NO: 35168 - RNA, 21 nt, synthetic construct
  source 1..21: mol_type = other RNA
gcccctgacaggcgcaagttc

SEQ ID NO: 35169 - RNA, 21 nt, synthetic construct
  source 1..21: mol_type = other RNA
gcctccttctcttttggttgt

SEQ ID NO: 35170 - RNA, 21 nt, synthetic construct
  source 1..21: mol_type = other RNA
gcctgtcaggggctggatcca

SEQ ID NO: 35171 - RNA, 21 nt, synthetic construct
  source 1..21: mol_type = other RNA
gcgattatacatcaggaagta

SEQ ID NO: 35172 - RNA, 21 nt, synthetic construct
  source 1..21: mol_type = other RNA
gcgcaagttctcctgaaaaat

SEQ ID NO: 35173 - RNA, 21 nt, synthetic construct
  source 1..21: mol_type = other RNA
gcgcctgtcaggggctggatc

SEQ ID NO: 35174 - RNA, 21 nt, synthetic construct
  source 1..21: mol_type = other RNA
gctatccatagcaatgaattt

SEQ ID NO: 35175 - RNA, 21 nt, synthetic construct
  source 1..21: mol_type = other RNA
gctccatgaacaaccaaaaga

SEQ ID NO: 35176 - RNA, 21 nt, synthetic construct
  source 1..21: mol_type = other RNA
gctgcttggggatgacccaaa

SEQ ID NO: 35177 - RNA, 21 nt, synthetic construct
  source 1..21: mol_type = other RNA
gctggatccagaaacctgtgg

SEQ ID NO: 35178 - RNA, 21 nt, synthetic construct
  source 1..21: mol_type = other RNA
gcttaaacttccttgggatct

SEQ ID NO: 35179 - RNA, 21 nt, synthetic construct
  source 1..21: mol_type = other RNA
gcttctggcaaacttacatcc

SEQ ID NO: 35180 - RNA, 21 nt, synthetic construct
  source 1..21: mol_type = other RNA
gcttggggatgacccaaaaga

SEQ ID NO: 35181 - RNA, 21 nt, synthetic construct
  source 1..21: mol_type = other RNA
ggaagtaaacaaacctctttt

SEQ ID NO: 35182 - RNA, 21 nt, synthetic construct
  source 1..21: mol_type = other RNA
ggaagtttaagctgcttgggg

SEQ ID NO: 35183 - RNA, 21 nt, synthetic construct
  source 1..21: mol_type = other RNA
ggagaacttgcgcctgtcagg

SEQ ID NO: 35184 - RNA, 21 nt, synthetic construct
  source 1..21: mol_type = other RNA
ggagcatgtactacaatggat

SEQ ID NO: 35185 - RNA, 21 nt, synthetic construct
  source 1..21: mol_type = other RNA
ggaggcaccacaggtttctgg

SEQ ID NO: 35186 - RNA, 21 nt, synthetic construct
  source 1..21: mol_type = other RNA
ggatccagaaacctgtggtgc

SEQ ID NO: 35187 - RNA, 21 nt, synthetic construct
  source 1..21: mol_type = other RNA
ggatccagcccctgacaggcg

SEQ ID NO: 35188 - RNA, 21 nt, synthetic construct
  source 1..21: mol_type = other RNA
ggatcttgcttctggcaaact

SEQ ID NO: 35189 - RNA, 21 nt, synthetic construct
  source 1..21: mol_type = other RNA
ggatgacccaaaagaggtttg

SEQ ID NO: 35190 - RNA, 21 nt, synthetic construct
  source 1..21: mol_type = other RNA
ggatgtaagtttgccagaagc

SEQ ID NO: 35191 - RNA, 21 nt, synthetic construct
  source 1..21: mol_type = other RNA
ggcaaacttacatccattgta

SEQ ID NO: 35192 - RNA, 21 nt, synthetic construct
  source 1..21: mol_type = other RNA
ggcaccacaggtttctggatc

SEQ ID NO: 35193 - RNA, 21 nt, synthetic construct
  source 1..21: mol_type = other RNA
ggcgcaagttctcctgaaaaa

SEQ ID NO: 35194 - RNA, 21 nt, synthetic construct
  source 1..21: mol_type = other RNA
ggctggatccagaaacctgtg

SEQ ID NO: 35195 - RNA, 21 nt, synthetic construct
  source 1..21: mol_type = other RNA
gggatcttgcttctggcaaac

SEQ ID NO: 35196 - RNA, 21 nt, synthetic construct
  source 1..21: mol_type = other RNA
gggatgacccaaaagaggttt

SEQ ID NO: 35197 - RNA, 21 nt, synthetic construct
  source 1..21: mol_type = other RNA
gggctggatccagaaacctgt

SEQ ID NO: 35198 - RNA, 21 nt, synthetic construct
  source 1..21: mol_type = other RNA
ggggatgacccaaaagaggtt

SEQ ID NO: 35199 - RNA, 21 nt, synthetic construct
  source 1..21: mol_type = other RNA
ggggctggatccagaaacctg

SEQ ID NO: 35200 - RNA, 21 nt, synthetic construct
  source 1..21: mol_type = other RNA
gggtcatccccaagcagctta

SEQ ID NO: 35201 - RNA, 21 nt, synthetic construct
  source 1..21: mol_type = other RNA
ggtcatccccaagcagcttaa

SEQ ID NO: 35202 - RNA, 21 nt, synthetic construct
  source 1..21: mol_type = other RNA
ggtcttttgatttttcaggag

SEQ ID NO: 35203 - RNA, 21 nt, synthetic construct
  source 1..21: mol_type = other RNA
ggtgcctccttctcttttggt

SEQ ID NO: 35204 - RNA, 21 nt, synthetic construct
  source 1..21: mol_type = other RNA
ggttgttcatggagcatgtac

SEQ ID NO: 35205 - RNA, 21 nt, synthetic construct
  source 1..21: mol_type = other RNA
ggtttctggatccagcccctg

SEQ ID NO: 35206 - RNA, 21 nt, synthetic construct
  source 1..21: mol_type = other RNA
ggtttgtttacttcctgatgt

SEQ ID NO: 35207 - RNA, 21 nt, synthetic construct
  source 1..21: mol_type = other RNA
gtaaacaaacctcttttgggt

SEQ ID NO: 35208 - RNA, 21 nt, synthetic construct
  source 1..21: mol_type = other RNA
gtaagtttgccagaagcaaga

SEQ ID NO: 35209 - RNA, 21 nt, synthetic construct
  source 1..21: mol_type = other RNA
gtacatgctccatgaacaacc

SEQ ID NO: 35210 - RNA, 21 nt, synthetic construct
  source 1..21: mol_type = other RNA
gtactacaatggatgtaagtt

SEQ ID NO: 35211 - RNA, 21 nt, synthetic construct
  source 1..21: mol_type = other RNA
gtagtacatgctccatgaaca

SEQ ID NO: 35212 - RNA, 21 nt, synthetic construct
  source 1..21: mol_type = other RNA
gtcaggggctggatccagaaa

SEQ ID NO: 35213 - RNA, 21 nt, synthetic construct
  source 1..21: mol_type = other RNA
gtcatccccaagcagcttaaa

SEQ ID NO: 35214 - RNA, 21 nt, synthetic construct
  source 1..21: mol_type = other RNA
gtcttttgatttttcaggaga

SEQ ID NO: 35215 - RNA, 21 nt, synthetic construct
  source 1..21: mol_type = other RNA
gtgcctccttctcttttggtt

SEQ ID NO: 35216 - RNA, 21 nt, synthetic construct
  source 1..21: mol_type = other RNA
gtggtgcctccttctcttttg

SEQ ID NO: 35217 - RNA, 21 nt, synthetic construct
  source 1..21: mol_type = other RNA
gttcatggagcatgtactaca

SEQ ID NO: 35218 - RNA, 21 nt, synthetic construct
  source 1..21: mol_type = other RNA
gttctcctgaaaaatcaaaag

SEQ ID NO: 35219 - RNA, 21 nt, synthetic construct
  source 1..21: mol_type = other RNA
gttgttcatggagcatgtact

SEQ ID NO: 35220 - RNA, 21 nt, synthetic construct
  source 1..21: mol_type = other RNA
gtttaagctgcttggggatga

SEQ ID NO: 35221 - RNA, 21 nt, synthetic construct
  source 1..21: mol_type = other RNA
gtttacttcctgatgtataat

SEQ ID NO: 35222 - RNA, 21 nt, synthetic construct
  source 1..21: mol_type = other RNA
gtttctggatccagcccctga

SEQ ID NO: 35223 - RNA, 21 nt, synthetic construct
  source 1..21: mol_type = other RNA
gtttgccagaagcaagatccc

SEQ ID NO: 35224 - RNA, 21 nt, synthetic construct
  source 1..21: mol_type = other RNA
gtttgtttacttcctgatgta

SEQ ID NO: 35225 - RNA, 21 nt, synthetic construct
  source 1..21: mol_type = other RNA
taaacaaacctcttttgggtc

SEQ ID NO: 35226 - RNA, 21 nt, synthetic construct
  source 1..21: mol_type = other RNA
taaacttccttgggatcttgc

SEQ ID NO: 35227 - RNA, 21 nt, synthetic construct
  source 1..21: mol_type = other RNA
taaagcgattatacatcagga

SEQ ID NO: 35228 - RNA, 21 nt, synthetic construct
  source 1..21: mol_type = other RNA
taagctgcttggggatgaccc

SEQ ID NO: 35229 - RNA, 21 nt, synthetic construct
  source 1..21: mol_type = other RNA
taagtttgccagaagcaagat

SEQ ID NO: 35230 - RNA, 21 nt, synthetic construct
  source 1..21: mol_type = other RNA
tacaatggatgtaagtttgcc

SEQ ID NO: 35231 - RNA, 21 nt, synthetic construct
  source 1..21: mol_type = other RNA
tacatcaggaagtaaacaaac

SEQ ID NO: 35232 - RNA, 21 nt, synthetic construct
  source 1..21: mol_type = other RNA
tacatccattgtagtacatgc

SEQ ID NO: 35233 - RNA, 21 nt, synthetic construct
  source 1..21: mol_type = other RNA
tacatgctccatgaacaacca

SEQ ID NO: 35234 - RNA, 21 nt, synthetic construct
  source 1..21: mol_type = other RNA
tactacaatggatgtaagttt

SEQ ID NO: 35235 - RNA, 21 nt, synthetic construct
  source 1..21: mol_type = other RNA
tacttcctgatgtataatcgc

SEQ ID NO: 35236 - RNA, 21 nt, synthetic construct
  source 1..21: mol_type = other RNA
tagcaatgaatttggtctttt

SEQ ID NO: 35237 - RNA, 21 nt, synthetic construct
  source 1..21: mol_type = other RNA
tagtacatgctccatgaacaa

SEQ ID NO: 35238 - RNA, 21 nt, synthetic construct
  source 1..21: mol_type = other RNA
tatacatcaggaagtaaacaa

SEQ ID NO: 35239 - RNA, 21 nt, synthetic construct
  source 1..21: mol_type = other RNA
tatccatagcaatgaatttgg

SEQ ID NO: 35240 - RNA, 21 nt, synthetic construct
  source 1..21: mol_type = other RNA
tcaaaagaccaaattcattgc

SEQ ID NO: 35241 - RNA, 21 nt, synthetic construct
  source 1..21: mol_type = other RNA
tcaggaagtaaacaaacctct

SEQ ID NO: 35242 - RNA, 21 nt, synthetic construct
  source 1..21: mol_type = other RNA
tcaggagaacttgcgcctgtc

SEQ ID NO: 35243 - RNA, 21 nt, synthetic construct
  source 1..21: mol_type = other RNA
tcaggggctggatccagaaac

SEQ ID NO: 35244 - RNA, 21 nt, synthetic construct
  source 1..21: mol_type = other RNA
tcatccccaagcagcttaaac

SEQ ID NO: 35245 - RNA, 21 nt, synthetic construct
  source 1..21: mol_type = other RNA
tcatggagcatgtactacaat

SEQ ID NO: 35246 - RNA, 21 nt, synthetic construct
  source 1..21: mol_type = other RNA
tccagaaacctgtggtgcctc

SEQ ID NO: 35247 - RNA, 21 nt, synthetic construct
  source 1..21: mol_type = other RNA
tccagcccctgacaggcgcaa

SEQ ID NO: 35248 - RNA, 21 nt, synthetic construct
  source 1..21: mol_type = other RNA
tccatagcaatgaatttggtc

SEQ ID NO: 35249 - RNA, 21 nt, synthetic construct
  source 1..21: mol_type = other RNA
tccatgaacaaccaaaagaga

SEQ ID NO: 35250 - RNA, 21 nt, synthetic construct
  source 1..21: mol_type = other RNA
tccattgtagtacatgctcca

SEQ ID NO: 35251 - RNA, 21 nt, synthetic construct
  source 1..21: mol_type = other RNA
tcccaaggaagtttaagctgc

SEQ ID NO: 35252 - RNA, 21 nt, synthetic construct
  source 1..21: mol_type = other RNA
tccccaagcagcttaaacttc

SEQ ID NO: 35253 - RNA, 21 nt, synthetic construct
  source 1..21: mol_type = other RNA
tcctgaaaaatcaaaagacca

SEQ ID NO: 35254 - RNA, 21 nt, synthetic construct
  source 1..21: mol_type = other RNA
tccttctcttttggttgttca

SEQ ID NO: 35255 - RNA, 21 nt, synthetic construct
  source 1..21: mol_type = other RNA
tccttgggatcttgcttctgg

SEQ ID NO: 35256 - RNA, 21 nt, synthetic construct
  source 1..21: mol_type = other RNA
tctcctgaaaaatcaaaagac

SEQ ID NO: 35257 - RNA, 21 nt, synthetic construct
  source 1..21: mol_type = other RNA
tctcttttggttgttcatgga

SEQ ID NO: 35258 - RNA, 21 nt, synthetic construct
  source 1..21: mol_type = other RNA
tctggatccagcccctgacag

SEQ ID NO: 35259 - RNA, 21 nt, synthetic construct
  source 1..21: mol_type = other RNA
tctggcaaacttacatccatt

SEQ ID NO: 35260 - RNA, 21 nt, synthetic construct
  source 1..21: mol_type = other RNA
tcttgcttctggcaaacttac

SEQ ID NO: 35261 - RNA, 21 nt, synthetic construct
  source 1..21: mol_type = other RNA
tcttttgatttttcaggagaa

SEQ ID NO: 35262 - RNA, 21 nt, synthetic construct
  source 1..21: mol_type = other RNA
tcttttgggtcatccccaagc

SEQ ID NO: 35263 - RNA, 21 nt, synthetic construct
  source 1..21: mol_type = other RNA
tcttttggttgttcatggagc

SEQ ID NO: 35264 - RNA, 21 nt, synthetic construct
  source 1..21: mol_type = other RNA
tgaacaaccaaaagagaagga

SEQ ID NO: 35265 - RNA, 21 nt, synthetic construct
  source 1..21: mol_type = other RNA
tgacaggcgcaagttctcctg

SEQ ID NO: 35266 - RNA, 21 nt, synthetic construct
  source 1..21: mol_type = other RNA
tgacccaaaagaggtttgttt

SEQ ID NO: 35267 - RNA, 21 nt, synthetic construct
  source 1..21: mol_type = other RNA
tgatttttcaggagaacttgc

SEQ ID NO: 35268 - RNA, 21 nt, synthetic construct
  source 1..21: mol_type = other RNA
tgccagaagcaagatcccaag

SEQ ID NO: 35269 - RNA, 21 nt, synthetic construct
  source 1..21: mol_type = other RNA
tgcctccttctcttttggttg

SEQ ID NO: 35270 - RNA, 21 nt, synthetic construct
  source 1..21: mol_type = other RNA
tgcgcctgtcaggggctggat

SEQ ID NO: 35271 - RNA, 21 nt, synthetic construct
  source 1..21: mol_type = other RNA
tgctccatgaacaaccaaaag

SEQ ID NO: 35272 - RNA, 21 nt, synthetic construct
  source 1..21: mol_type = other RNA
tgcttctggcaaacttacatc

SEQ ID NO: 35273 - RNA, 21 nt, synthetic construct
  source 1..21: mol_type = other RNA
tgcttggggatgacccaaaag

SEQ ID NO: 35274 - RNA, 21 nt, synthetic construct
  source 1..21: mol_type = other RNA
tggagcatgtactacaatgga

SEQ ID NO: 35275 - RNA, 21 nt, synthetic construct
  source 1..21: mol_type = other RNA
tggatccagaaacctgtggtg

SEQ ID NO: 35276 - RNA, 21 nt, synthetic construct
  source 1..21: mol_type = other RNA
tggatccagcccctgacaggc

SEQ ID NO: 35277 - RNA, 21 nt, synthetic construct
  source 1..21: mol_type = other RNA
tggatgtaagtttgccagaag

SEQ ID NO: 35278 - RNA, 21 nt, synthetic construct
  source 1..21: mol_type = other RNA
tggcaaacttacatccattgt

SEQ ID NO: 35279 - RNA, 21 nt, synthetic construct
  source 1..21: mol_type = other RNA
tgggatcttgcttctggcaaa

SEQ ID NO: 35280 - RNA, 21 nt, synthetic construct
  source 1..21: mol_type = other RNA
tggggatgacccaaaagaggt

SEQ ID NO: 35281 - RNA, 21 nt, synthetic construct
  source 1..21: mol_type = other RNA
tgggtcatccccaagcagctt

SEQ ID NO: 35282 - RNA, 21 nt, synthetic construct
  source 1..21: mol_type = other RNA
tggtcttttgatttttcagga

SEQ ID NO: 35283 - RNA, 21 nt, synthetic construct
  source 1..21: mol_type = other RNA
tggtgcctccttctcttttgg

SEQ ID NO: 35284 - RNA, 21 nt, synthetic construct
  source 1..21: mol_type = other RNA
tggttgttcatggagcatgta

SEQ ID NO: 35285 - RNA, 21 nt, synthetic construct
  source 1..21: mol_type = other RNA
tgtaagtttgccagaagcaag

SEQ ID NO: 35286 - RNA, 21 nt, synthetic construct
  source 1..21: mol_type = other RNA
tgtactacaatggatgtaagt

SEQ ID NO: 35287 - RNA, 21 nt, synthetic construct
  source 1..21: mol_type = other RNA
tgtagtacatgctccatgaac

SEQ ID NO: 35288 - RNA, 21 nt, synthetic construct
  source 1..21: mol_type = other RNA
tgtcaggggctggatccagaa

SEQ ID NO: 35289 - RNA, 21 nt, synthetic construct
  source 1..21: mol_type = other RNA
tgtggtgcctccttctctttt

SEQ ID NO: 35290 - RNA, 21 nt, synthetic construct
  source 1..21: mol_type = other RNA
tgttcatggagcatgtactac

SEQ ID NO: 35291 - RNA, 21 nt, synthetic construct
  source 1..21: mol_type = other RNA
tgtttacttcctgatgtataa

SEQ ID NO: 35292 - RNA, 21 nt, synthetic construct
  source 1..21: mol_type = other RNA
ttaaacttccttgggatcttg

SEQ ID NO: 35293 - RNA, 21 nt, synthetic construct
  source 1..21: mol_type = other RNA
ttaagctgcttggggatgacc

SEQ ID NO: 35294 - RNA, 21 nt, synthetic construct
  source 1..21: mol_type = other RNA
ttacatccattgtagtacatg

SEQ ID NO: 35295 - RNA, 21 nt, synthetic construct
  source 1..21: mol_type = other RNA
ttacttcctgatgtataatcg

SEQ ID NO: 35296 - RNA, 21 nt, synthetic construct
  source 1..21: mol_type = other RNA
ttatacatcaggaagtaaaca

SEQ ID NO: 35297 - RNA, 21 nt, synthetic construct
  source 1..21: mol_type = other RNA
ttcaggagaacttgcgcctgt

SEQ ID NO: 35298 - RNA, 21 nt, synthetic construct
  source 1..21: mol_type = other RNA
ttcatggagcatgtactacaa

SEQ ID NO: 35299 - RNA, 21 nt, synthetic construct
  source 1..21: mol_type = other RNA
ttccttgggatcttgcttctg

SEQ ID NO: 35300 - RNA, 21 nt, synthetic construct
  source 1..21: mol_type = other RNA
ttctcctgaaaaatcaaaaga

SEQ ID NO: 35301 - RNA, 21 nt, synthetic construct
  source 1..21: mol_type = other RNA
ttctcttttggttgttcatgg

SEQ ID NO: 35302 - RNA, 21 nt, synthetic construct
  source 1..21: mol_type = other RNA
ttctggatccagcccctgaca

SEQ ID NO: 35303 - RNA, 21 nt, synthetic construct
  source 1..21: mol_type = other RNA
ttctggcaaacttacatccat

SEQ ID NO: 35304 - RNA, 21 nt, synthetic construct
  source 1..21: mol_type = other RNA
ttgatttttcaggagaacttg

SEQ ID NO: 35305 - RNA, 21 nt, synthetic construct
  source 1..21: mol_type = other RNA
ttgccagaagcaagatcccaa

SEQ ID NO: 35306 - RNA, 21 nt, synthetic construct
  source 1..21: mol_type = other RNA
ttgcgcctgtcaggggctgga

SEQ ID NO: 35307 - RNA, 21 nt, synthetic construct
  source 1..21: mol_type = other RNA
ttgcttctggcaaacttacat

SEQ ID NO: 35308 - RNA, 21 nt, synthetic construct
  source 1..21: mol_type = other RNA
ttgggatcttgcttctggcaa

SEQ ID NO: 35309 - RNA, 21 nt, synthetic construct
  source 1..21: mol_type = other RNA
ttggggatgacccaaaagagg

SEQ ID NO: 35310 - RNA, 21 nt, synthetic construct
  source 1..21: mol_type = other RNA
ttgggtcatccccaagcagct

SEQ ID NO: 35311 - RNA, 21 nt, synthetic construct
  source 1..21: mol_type = other RNA
ttggtcttttgatttttcagg

SEQ ID NO: 35312 - RNA, 21 nt, synthetic construct
  source 1..21: mol_type = other RNA
ttggttgttcatggagcatgt

SEQ ID NO: 35313 - RNA, 21 nt, synthetic construct
  source 1..21: mol_type = other RNA
ttgtagtacatgctccatgaa

SEQ ID NO: 35314 - RNA, 21 nt, synthetic construct
  source 1..21: mol_type = other RNA
ttgttcatggagcatgtacta

SEQ ID NO: 35315 - RNA, 21 nt, synthetic construct
  source 1..21: mol_type = other RNA
ttgtttacttcctgatgtata

SEQ ID NO: 35316 - RNA, 21 nt, synthetic construct
  source 1..21: mol_type = other RNA
tttaagctgcttggggatgac

SEQ ID NO: 35317 - RNA, 21 nt, synthetic construct
  source 1..21: mol_type = other RNA
tttacttcctgatgtataatc

SEQ ID NO: 35318 - RNA, 21 nt, synthetic construct
  source 1..21: mol_type = other RNA
tttcaggagaacttgcgcctg

SEQ ID NO: 35319 - RNA, 21 nt, synthetic construct
  source 1..21: mol_type = other RNA
tttctggatccagcccctgac

SEQ ID NO: 35320 - RNA, 21 nt, synthetic construct
  source 1..21: mol_type = other RNA
tttgatttttcaggagaactt

SEQ ID NO: 35321 - RNA, 21 nt, synthetic construct
  source 1..21: mol_type = other RNA
tttgccagaagcaagatccca

SEQ ID NO: 35322 - RNA, 21 nt, synthetic construct
  source 1..21: mol_type = other RNA
tttgggtcatccccaagcagc

SEQ ID NO: 35323 - RNA, 21 nt, synthetic construct
  source 1..21: mol_type = other RNA
tttggtcttttgatttttcag

SEQ ID NO: 35324 - RNA, 21 nt, synthetic construct
  source 1..21: mol_type = other RNA
tttggttgttcatggagcatg

SEQ ID NO: 35325 - RNA, 21 nt, synthetic construct
  source 1..21: mol_type = other RNA
tttgtttacttcctgatgtat

SEQ ID NO: 35326 - RNA, 21 nt, synthetic construct
  source 1..21: mol_type = other RNA
ttttcaggagaacttgcgcct

SEQ ID NO: 35327 - RNA, 21 nt, synthetic construct
  source 1..21: mol_type = other RNA
ttttgatttttcaggagaact

SEQ ID NO: 35328 - RNA, 21 nt, synthetic construct
  source 1..21: mol_type = other RNA
ttttgggtcatccccaagcag

SEQ ID NO: 35329 - RNA, 21 nt, synthetic construct
  source 1..21: mol_type = other RNA
ttttggttgttcatggagcat

SEQ ID NO: 35330 - RNA, 21 nt, synthetic construct
  source 1..21: mol_type = other RNA
tttttcaggagaacttgcgcc

SEQ ID NO: 35331 - RNA, 22 nt, synthetic construct
  source 1..22: mol_type = other RNA
aaaagagaaggaggcaccacag

SEQ ID NO: 35332 - RNA, 22 nt, synthetic construct
  source 1..22: mol_type = other RNA
aaaagaggtttgtttacttcct

SEQ ID NO: 35333 - RNA, 22 nt, synthetic construct
  source 1..22: mol_type = other RNA
aaacaaacctcttttgggtcat

SEQ ID NO: 35334 - RNA, 22 nt, synthetic construct
  source 1..22: mol_type = other RNA
aaacctcttttgggtcatcccc

SEQ ID NO: 35335 - RNA, 22 nt, synthetic construct
  source 1..22: mol_type = other RNA
aaacctgtggtgcctccttctc

SEQ ID NO: 35336 - RNA, 22 nt, synthetic construct
  source 1..22: mol_type = other RNA
aaacttacatccattgtagtac

SEQ ID NO: 35337 - RNA, 22 nt, synthetic construct
  source 1..22: mol_type = other RNA
aaacttccttgggatcttgctt

SEQ ID NO: 35338 - RNA, 22 nt, synthetic construct
  source 1..22: mol_type = other RNA
aaagagaaggaggcaccacagg

SEQ ID NO: 35339 - RNA, 22 nt, synthetic construct
  source 1..22: mol_type = other RNA
aaagaggtttgtttacttcctg

SEQ ID NO: 35340 - RNA, 22 nt, synthetic construct
  source 1..22: mol_type = other RNA
aaagcgattatacatcaggaag

SEQ ID NO: 35341 - RNA, 22 nt, synthetic construct
  source 1..22: mol_type = other RNA
aaataaagcgattatacatcag

SEQ ID NO: 35342 - RNA, 22 nt, synthetic construct
  source 1..22: mol_type = other RNA
aacaaacctcttttgggtcatc

SEQ ID NO: 35343 - RNA, 22 nt, synthetic construct
  source 1..22: mol_type = other RNA
aacaaccaaaagagaaggaggc

SEQ ID NO: 35344 - RNA, 22 nt, synthetic construct
  source 1..22: mol_type = other RNA
aaccaaaagagaaggaggcacc

SEQ ID NO: 35345 - RNA, 22 nt, synthetic construct
  source 1..22: mol_type = other RNA
aacctcttttgggtcatcccca

SEQ ID NO: 35346 - RNA, 22 nt, synthetic construct
  source 1..22: mol_type = other RNA
aacctgtggtgcctccttctct

SEQ ID NO: 35347 - RNA, 22 nt, synthetic construct
  source 1..22: mol_type = other RNA
aacttacatccattgtagtaca

SEQ ID NO: 35348 - RNA, 22 nt, synthetic construct
  source 1..22: mol_type = other RNA
aacttccttgggatcttgcttc

SEQ ID NO: 35349 - RNA, 22 nt, synthetic construct
  source 1..22: mol_type = other RNA
aacttgcgcctgtcaggggctg

SEQ ID NO: 35350 - RNA, 22 nt, synthetic construct
  source 1..22: mol_type = other RNA
aagagaaggaggcaccacaggt

SEQ ID NO: 35351 - RNA, 22 nt, synthetic construct
  source 1..22: mol_type = other RNA
aagaggtttgtttacttcctga

SEQ ID NO: 35352 - RNA, 22 nt, synthetic construct
  source 1..22: mol_type = other RNA
aagatcccaaggaagtttaagc

SEQ ID NO: 35353 - RNA, 22 nt, synthetic construct
  source 1..22: mol_type = other RNA
aagcaagatcccaaggaagttt

SEQ ID NO: 35354 - RNA, 22 nt, synthetic construct
  source 1..22: mol_type = other RNA
aagcagcttaaacttccttggg

SEQ ID NO: 35355 - RNA, 22 nt, synthetic construct
  source 1..22: mol_type = other RNA
aagcgattatacatcaggaagt

SEQ ID NO: 35356 - RNA, 22 nt, synthetic construct
  source 1..22: mol_type = other RNA
aagctgcttggggatgacccaa

SEQ ID NO: 35357 - RNA, 22 nt, synthetic construct
  source 1..22: mol_type = other RNA
aaggaagtttaagctgcttggg

SEQ ID NO: 35358 - RNA, 22 nt, synthetic construct
  source 1..22: mol_type = other RNA
aaggaggcaccacaggtttctg

SEQ ID NO: 35359 - RNA, 22 nt, synthetic construct
  source 1..22: mol_type = other RNA
aagtaaacaaacctcttttggg

SEQ ID NO: 35360 - RNA, 22 nt, synthetic construct
  source 1..22: mol_type = other RNA
aagttctcctgaaaaatcaaaa

SEQ ID NO: 35361 - RNA, 22 nt, synthetic construct
  source 1..22: mol_type = other RNA
aagtttaagctgcttggggatg

SEQ ID NO: 35362 - RNA, 22 nt, synthetic construct
  source 1..22: mol_type = other RNA
aagtttgccagaagcaagatcc

SEQ ID NO: 35363 - RNA, 22 nt, synthetic construct
  source 1..22: mol_type = other RNA
aataaagcgattatacatcagg

SEQ ID NO: 35364 - RNA, 22 nt, synthetic construct
  source 1..22: mol_type = other RNA
aatcaaaagaccaaattcattg

SEQ ID NO: 35365 - RNA, 22 nt, synthetic construct
  source 1..22: mol_type = other RNA
aatggatgtaagtttgccagaa

SEQ ID NO: 35366 - RNA, 22 nt, synthetic construct
  source 1..22: mol_type = other RNA
acaaacctcttttgggtcatcc

SEQ ID NO: 35367 - RNA, 22 nt, synthetic construct
  source 1..22: mol_type = other RNA
acaaccaaaagagaaggaggca

SEQ ID NO: 35368 - RNA, 22 nt, synthetic construct
  source 1..22: mol_type = other RNA
acaatggatgtaagtttgccag

SEQ ID NO: 35369 - RNA, 22 nt, synthetic construct
  source 1..22: mol_type = other RNA
acaggcgcaagttctcctgaaa

SEQ ID NO: 35370 - RNA, 22 nt, synthetic construct
  source 1..22: mol_type = other RNA
acaggtttctggatccagcccc

SEQ ID NO: 35371 - RNA, 22 nt, synthetic construct
  source 1..22: mol_type = other RNA
acatcaggaagtaaacaaacct

SEQ ID NO: 35372 - RNA, 22 nt, synthetic construct
  source 1..22: mol_type = other RNA
acatccattgtagtacatgctc

SEQ ID NO: 35373 - RNA, 22 nt, synthetic construct
  source 1..22: mol_type = other RNA
acatgctccatgaacaaccaaa

SEQ ID NO: 35374 - RNA, 22 nt, synthetic construct
  source 1..22: mol_type = other RNA
accaaaagagaaggaggcacca

SEQ ID NO: 35375 - RNA, 22 nt, synthetic construct
  source 1..22: mol_type = other RNA
accacaggtttctggatccagc

SEQ ID NO: 35376 - RNA, 22 nt, synthetic construct
  source 1..22: mol_type = other RNA
acccaaaagaggtttgtttact

SEQ ID NO: 35377 - RNA, 22 nt, synthetic construct
  source 1..22: mol_type = other RNA
acctcttttgggtcatccccaa

SEQ ID NO: 35378 - RNA, 22 nt, synthetic construct
  source 1..22: mol_type = other RNA
acctgtggtgcctccttctctt

SEQ ID NO: 35379 - RNA, 22 nt, synthetic construct
  source 1..22: mol_type = other RNA
actacaatggatgtaagtttgc

SEQ ID NO: 35380 - RNA, 22 nt, synthetic construct
  source 1..22: mol_type = other RNA
acttacatccattgtagtacat

SEQ ID NO: 35381 - RNA, 22 nt, synthetic construct
  source 1..22: mol_type = other RNA
acttcctgatgtataatcgctt

SEQ ID NO: 35382 - RNA, 22 nt, synthetic construct
  source 1..22: mol_type = other RNA
acttccttgggatcttgcttct

SEQ ID NO: 35383 - RNA, 22 nt, synthetic construct
  source 1..22: mol_type = other RNA
acttgcgcctgtcaggggctgg

SEQ ID NO: 35384 - RNA, 22 nt, synthetic construct
  source 1..22: mol_type = other RNA
agaaacctgtggtgcctccttc

SEQ ID NO: 35385 - RNA, 22 nt, synthetic construct
  source 1..22: mol_type = other RNA
agaacttgcgcctgtcaggggc

SEQ ID NO: 35386 - RNA, 22 nt, synthetic construct
  source 1..22: mol_type = other RNA
agaagcaagatcccaaggaagt

SEQ ID NO: 35387 - RNA, 22 nt, synthetic construct
  source 1..22: mol_type = other RNA
agaaggaggcaccacaggtttc

SEQ ID NO: 35388 - RNA, 22 nt, synthetic construct
  source 1..22: mol_type = other RNA
agagaaggaggcaccacaggtt

SEQ ID NO: 35389 - RNA, 22 nt, synthetic construct
  source 1..22: mol_type = other RNA
agaggtttgtttacttcctgat

SEQ ID NO: 35390 - RNA, 22 nt, synthetic construct
  source 1..22: mol_type = other RNA
agatcccaaggaagtttaagct

SEQ ID NO: 35391 - RNA, 22 nt, synthetic construct
  source 1..22: mol_type = other RNA
agcaagatcccaaggaagttta

SEQ ID NO: 35392 - RNA, 22 nt, synthetic construct
  source 1..22: mol_type = other RNA
agcaatgaatttggtcttttga

SEQ ID NO: 35393 - RNA, 22 nt, synthetic construct
  source 1..22: mol_type = other RNA
agcagcttaaacttccttggga

SEQ ID NO: 35394 - RNA, 22 nt, synthetic construct
  source 1..22: mol_type = other RNA
agcatgtactacaatggatgta

SEQ ID NO: 35395 - RNA, 22 nt, synthetic construct
  source 1..22: mol_type = other RNA
agcccctgacaggcgcaagttc

SEQ ID NO: 35396 - RNA, 22 nt, synthetic construct
  source 1..22: mol_type = other RNA
agcgattatacatcaggaagta

SEQ ID NO: 35397 - RNA, 22 nt, synthetic construct
  source 1..22: mol_type = other RNA
agctgcttggggatgacccaaa

SEQ ID NO: 35398 - RNA, 22 nt, synthetic construct
  source 1..22: mol_type = other RNA
agcttaaacttccttgggatct

SEQ ID NO: 35399 - RNA, 22 nt, synthetic construct
  source 1..22: mol_type = other RNA
aggaagtaaacaaacctctttt

SEQ ID NO: 35400 - RNA, 22 nt, synthetic construct
  source 1..22: mol_type = other RNA
aggaagtttaagctgcttgggg

SEQ ID NO: 35401 - RNA, 22 nt, synthetic construct
  source 1..22: mol_type = other RNA
aggagaacttgcgcctgtcagg

SEQ ID NO: 35402 - RNA, 22 nt, synthetic construct
  source 1..22: mol_type = other RNA
aggaggcaccacaggtttctgg

SEQ ID NO: 35403 - RNA, 22 nt, synthetic construct
  source 1..22: mol_type = other RNA
aggcaccacaggtttctggatc

SEQ ID NO: 35404 - RNA, 22 nt, synthetic construct
  source 1..22: mol_type = other RNA
aggcgcaagttctcctgaaaaa

SEQ ID NO: 35405 - RNA, 22 nt, synthetic construct
  source 1..22: mol_type = other RNA
aggggctggatccagaaacctg

SEQ ID NO: 35406 - RNA, 22 nt, synthetic construct
  source 1..22: mol_type = other RNA
aggtttctggatccagcccctg

SEQ ID NO: 35407 - RNA, 22 nt, synthetic construct
  source 1..22: mol_type = other RNA
aggtttgtttacttcctgatgt

SEQ ID NO: 35408 - RNA, 22 nt, synthetic construct
  source 1..22: mol_type = other RNA
agtaaacaaacctcttttgggt

SEQ ID NO: 35409 - RNA, 22 nt, synthetic construct
  source 1..22: mol_type = other RNA
agtacatgctccatgaacaacc

SEQ ID NO: 35410 - RNA, 22 nt, synthetic construct
  source 1..22: mol_type = other RNA
agttctcctgaaaaatcaaaag

SEQ ID NO: 35411 - RNA, 22 nt, synthetic construct
  source 1..22: mol_type = other RNA
agtttaagctgcttggggatga

SEQ ID NO: 35412 - RNA, 22 nt, synthetic construct
  source 1..22: mol_type = other RNA
agtttgccagaagcaagatccc

SEQ ID NO: 35413 - RNA, 22 nt, synthetic construct
  source 1..22: mol_type = other RNA
ataaagcgattatacatcagga

SEQ ID NO: 35414 - RNA, 22 nt, synthetic construct
  source 1..22: mol_type = other RNA
atacatcaggaagtaaacaaac

SEQ ID NO: 35415 - RNA, 22 nt, synthetic construct
  source 1..22: mol_type = other RNA
atagcaatgaatttggtctttt

SEQ ID NO: 35416 - RNA, 22 nt, synthetic construct
  source 1..22: mol_type = other RNA
atcaaaagaccaaattcattgc

SEQ ID NO: 35417 - RNA, 22 nt, synthetic construct
  source 1..22: mol_type = other RNA
atcaggaagtaaacaaacctct

SEQ ID NO: 35418 - RNA, 22 nt, synthetic construct
  source 1..22: mol_type = other RNA
atccagaaacctgtggtgcctc

SEQ ID NO: 35419 - RNA, 22 nt, synthetic construct
  source 1..22: mol_type = other RNA
atccagcccctgacaggcgcaa

SEQ ID NO: 35420 - RNA, 22 nt, synthetic construct
  source 1..22: mol_type = other RNA
atccatagcaatgaatttggtc

SEQ ID NO: 35421 - RNA, 22 nt, synthetic construct
  source 1..22: mol_type = other RNA
atccattgtagtacatgctcca

SEQ ID NO: 35422 - RNA, 22 nt, synthetic construct
  source 1..22: mol_type = other RNA
atcccaaggaagtttaagctgc

SEQ ID NO: 35423 - RNA, 22 nt, synthetic construct
  source 1..22: mol_type = other RNA
atccccaagcagcttaaacttc

SEQ ID NO: 35424 - RNA, 22 nt, synthetic construct
  source 1..22: mol_type = other RNA
atcttgcttctggcaaacttac

SEQ ID NO: 35425 - RNA, 22 nt, synthetic construct
  source 1..22: mol_type = other RNA
atgaacaaccaaaagagaagga

SEQ ID NO: 35426 - RNA, 22 nt, synthetic construct
  source 1..22: mol_type = other RNA
atgacccaaaagaggtttgttt

SEQ ID NO: 35427 - RNA, 22 nt, synthetic construct
  source 1..22: mol_type = other RNA
atgctccatgaacaaccaaaag

SEQ ID NO: 35428 - RNA, 22 nt, synthetic construct
  source 1..22: mol_type = other RNA
atggagcatgtactacaatgga

SEQ ID NO: 35429 - RNA, 22 nt, synthetic construct
  source 1..22: mol_type = other RNA
atggatgtaagtttgccagaag

SEQ ID NO: 35430 - RNA, 22 nt, synthetic construct
  source 1..22: mol_type = other RNA
atgtaagtttgccagaagcaag

SEQ ID NO: 35431 - RNA, 22 nt, synthetic construct
  source 1..22: mol_type = other RNA
atgtactacaatggatgtaagt

SEQ ID NO: 35432 - RNA, 22 nt, synthetic construct
  source 1..22: mol_type = other RNA
attatacatcaggaagtaaaca

SEQ ID NO: 35433 - RNA, 22 nt, synthetic construct
  source 1..22: mol_type = other RNA
attgtagtacatgctccatgaa

SEQ ID NO: 35434 - RNA, 22 nt, synthetic construct
  source 1..22: mol_type = other RNA
atttggtcttttgatttttcag

SEQ ID NO: 35435 - RNA, 22 nt, synthetic construct
  source 1..22: mol_type = other RNA
atttttcaggagaacttgcgcc

SEQ ID NO: 35436 - RNA, 22 nt, synthetic construct
  source 1..22: mol_type = other RNA
caaaagaccaaattcattgcta

SEQ ID NO: 35437 - RNA, 22 nt, synthetic construct
  source 1..22: mol_type = other RNA
caaaagagaaggaggcaccaca

SEQ ID NO: 35438 - RNA, 22 nt, synthetic construct
  source 1..22: mol_type = other RNA
caaaagaggtttgtttacttcc

SEQ ID NO: 35439 - RNA, 22 nt, synthetic construct
  source 1..22: mol_type = other RNA
caaacctcttttgggtcatccc

SEQ ID NO: 35440 - RNA, 22 nt, synthetic construct
  source 1..22: mol_type = other RNA
caaacttacatccattgtagta

SEQ ID NO: 35441 - RNA, 22 nt, synthetic construct
  source 1..22: mol_type = other RNA
caaccaaaagagaaggaggcac

SEQ ID NO: 35442 - RNA, 22 nt, synthetic construct
  source 1..22: mol_type = other RNA
caagatcccaaggaagtttaag

SEQ ID NO: 35443 - RNA, 22 nt, synthetic construct
  source 1..22: mol_type = other RNA
caagcagcttaaacttccttgg

SEQ ID NO: 35444 - RNA, 22 nt, synthetic construct
  source 1..22: mol_type = other RNA
caaggaagtttaagctgcttgg

SEQ ID NO: 35445 - RNA, 22 nt, synthetic construct
  source 1..22: mol_type = other RNA
caagttctcctgaaaaatcaaa

SEQ ID NO: 35446 - RNA, 22 nt, synthetic construct
  source 1..22: mol_type = other RNA
caatgaatttggtcttttgatt

SEQ ID NO: 35447 - RNA, 22 nt, synthetic construct
  source 1..22: mol_type = other RNA
caatggatgtaagtttgccaga

SEQ ID NO: 35448 - RNA, 22 nt, synthetic construct
  source 1..22: mol_type = other RNA
cacaggtttctggatccagccc

SEQ ID NO: 35449 - RNA, 22 nt, synthetic construct
  source 1..22: mol_type = other RNA
caccacaggtttctggatccag

SEQ ID NO: 35450 - RNA, 22 nt, synthetic construct
  source 1..22: mol_type = other RNA
cagaaacctgtggtgcctcctt

SEQ ID NO: 35451 - RNA, 22 nt, synthetic construct
  source 1..22: mol_type = other RNA
cagaagcaagatcccaaggaag

SEQ ID NO: 35452 - RNA, 22 nt, synthetic construct
  source 1..22: mol_type = other RNA
cagcccctgacaggcgcaagtt

SEQ ID NO: 35453 - RNA, 22 nt, synthetic construct
  source 1..22: mol_type = other RNA
cagcttaaacttccttgggatc

SEQ ID NO: 35454 - RNA, 22 nt, synthetic construct
  source 1..22: mol_type = other RNA
caggaagtaaacaaacctcttt

SEQ ID NO: 35455 - RNA, 22 nt, synthetic construct
  source 1..22: mol_type = other RNA
caggagaacttgcgcctgtcag

SEQ ID NO: 35456 - RNA, 22 nt, synthetic construct
  source 1..22: mol_type = other RNA
caggcgcaagttctcctgaaaa

SEQ ID NO: 35457 - RNA, 22 nt, synthetic construct
  source 1..22: mol_type = other RNA
caggggctggatccagaaacct

SEQ ID NO: 35458 - RNA, 22 nt, synthetic construct
  source 1..22: mol_type = other RNA
caggtttctggatccagcccct

SEQ ID NO: 35459 - RNA, 22 nt, synthetic construct
  source 1..22: mol_type = other RNA
catagcaatgaatttggtcttt

SEQ ID NO: 35460 - RNA, 22 nt, synthetic construct
  source 1..22: mol_type = other RNA
catcaggaagtaaacaaacctc

SEQ ID NO: 35461 - RNA, 22 nt, synthetic construct
  source 1..22: mol_type = other RNA
catccattgtagtacatgctcc

SEQ ID NO: 35462 - RNA, 22 nt, synthetic construct
  source 1..22: mol_type = other RNA
catccccaagcagcttaaactt

SEQ ID NO: 35463 - RNA, 22 nt, synthetic construct
  source 1..22: mol_type = other RNA
catgaacaaccaaaagagaagg

SEQ ID NO: 35464 - RNA, 22 nt, synthetic construct
  source 1..22: mol_type = other RNA
catgctccatgaacaaccaaaa

SEQ ID NO: 35465 - RNA, 22 nt, synthetic construct
  source 1..22: mol_type = other RNA
catggagcatgtactacaatgg

SEQ ID NO: 35466 - RNA, 22 nt, synthetic construct
  source 1..22: mol_type = other RNA
catgtactacaatggatgtaag

SEQ ID NO: 35467 - RNA, 22 nt, synthetic construct
  source 1..22: mol_type = other RNA
cattgtagtacatgctccatga

SEQ ID NO: 35468 - RNA, 22 nt, synthetic construct
  source 1..22: mol_type = other RNA
ccaaaagagaaggaggcaccac

SEQ ID NO: 35469 - RNA, 22 nt, synthetic construct
  source 1..22: mol_type = other RNA
ccaaaagaggtttgtttacttc

SEQ ID NO: 35470 - RNA, 22 nt, synthetic construct
  source 1..22: mol_type = other RNA
ccaagcagcttaaacttccttg

SEQ ID NO: 35471 - RNA, 22 nt, synthetic construct
  source 1..22: mol_type = other RNA
ccaaggaagtttaagctgcttg

SEQ ID NO: 35472 - RNA, 22 nt, synthetic construct
  source 1..22: mol_type = other RNA
ccacaggtttctggatccagcc

SEQ ID NO: 35473 - RNA, 22 nt, synthetic construct
  source 1..22: mol_type = other RNA
ccagaaacctgtggtgcctcct

SEQ ID NO: 35474 - RNA, 22 nt, synthetic construct
  source 1..22: mol_type = other RNA
ccagaagcaagatcccaaggaa

SEQ ID NO: 35475 - RNA, 22 nt, synthetic construct
  source 1..22: mol_type = other RNA
ccagcccctgacaggcgcaagt

SEQ ID NO: 35476 - RNA, 22 nt, synthetic construct
  source 1..22: mol_type = other RNA
ccatagcaatgaatttggtctt

SEQ ID NO: 35477 - RNA, 22 nt, synthetic construct
  source 1..22: mol_type = other RNA
ccatgaacaaccaaaagagaag

SEQ ID NO: 35478 - RNA, 22 nt, synthetic construct
  source 1..22: mol_type = other RNA
ccattgtagtacatgctccatg

SEQ ID NO: 35479 - RNA, 22 nt, synthetic construct
  source 1..22: mol_type = other RNA
cccaaaagaggtttgtttactt

SEQ ID NO: 35480 - RNA, 22 nt, synthetic construct
  source 1..22: mol_type = other RNA
cccaagcagcttaaacttcctt

SEQ ID NO: 35481 - RNA, 22 nt, synthetic construct
  source 1..22: mol_type = other RNA
cccaaggaagtttaagctgctt

SEQ ID NO: 35482 - RNA, 22 nt, synthetic construct
  source 1..22: mol_type = other RNA
ccccaagcagcttaaacttcct

SEQ ID NO: 35483 - RNA, 22 nt, synthetic construct
  source 1..22: mol_type = other RNA
cccctgacaggcgcaagttctc

SEQ ID NO: 35484 - RNA, 22 nt, synthetic construct
  source 1..22: mol_type = other RNA
ccctgacaggcgcaagttctcc

SEQ ID NO: 35485 - RNA, 22 nt, synthetic construct
  source 1..22: mol_type = other RNA
cctccttctcttttggttgttc

SEQ ID NO: 35486 - RNA, 22 nt, synthetic construct
  source 1..22: mol_type = other RNA
cctcttttgggtcatccccaag

SEQ ID NO: 35487 - RNA, 22 nt, synthetic construct
  source 1..22: mol_type = other RNA
cctgaaaaatcaaaagaccaaa

SEQ ID NO: 35488 - RNA, 22 nt, synthetic construct
  source 1..22: mol_type = other RNA
cctgacaggcgcaagttctcct

SEQ ID NO: 35489 - RNA, 22 nt, synthetic construct
  source 1..22: mol_type = other RNA
cctgtcaggggctggatccaga

SEQ ID NO: 35490 - RNA, 22 nt, synthetic construct
  source 1..22: mol_type = other RNA
cctgtggtgcctccttctcttt

SEQ ID NO: 35491 - RNA, 22 nt, synthetic construct
  source 1..22: mol_type = other RNA
ccttctcttttggttgttcatg

SEQ ID NO: 35492 - RNA, 22 nt, synthetic construct
  source 1..22: mol_type = other RNA
ccttgggatcttgcttctggca

SEQ ID NO: 35493 - RNA, 22 nt, synthetic construct
  source 1..22: mol_type = other RNA
cgattatacatcaggaagtaaa

SEQ ID NO: 35494 - RNA, 22 nt, synthetic construct
  source 1..22: mol_type = other RNA
cgcaagttctcctgaaaaatca

SEQ ID NO: 35495 - RNA, 22 nt, synthetic construct
  source 1..22: mol_type = other RNA
cgcctgtcaggggctggatcca

SEQ ID NO: 35496 - RNA, 22 nt, synthetic construct
  source 1..22: mol_type = other RNA
ctacaatggatgtaagtttgcc

SEQ ID NO: 35497 - RNA, 22 nt, synthetic construct
  source 1..22: mol_type = other RNA
ctatccatagcaatgaatttgg

SEQ ID NO: 35498 - RNA, 22 nt, synthetic construct
  source 1..22: mol_type = other RNA
ctccatgaacaaccaaaagaga

SEQ ID NO: 35499 - RNA, 22 nt, synthetic construct
  source 1..22: mol_type = other RNA
ctcctgaaaaatcaaaagacca

SEQ ID NO: 35500 - RNA, 22 nt, synthetic construct
  source 1..22: mol_type = other RNA
ctccttctcttttggttgttca

SEQ ID NO: 35501 - RNA, 22 nt, synthetic construct
  source 1..22: mol_type = other RNA
ctcttttgggtcatccccaagc

SEQ ID NO: 35502 - RNA, 22 nt, synthetic construct
  source 1..22: mol_type = other RNA
ctcttttggttgttcatggagc

SEQ ID NO: 35503 - RNA, 22 nt, synthetic construct
  source 1..22: mol_type = other RNA
ctgaaaaatcaaaagaccaaat

SEQ ID NO: 35504 - RNA, 22 nt, synthetic construct
  source 1..22: mol_type = other RNA
ctgacaggcgcaagttctcctg

SEQ ID NO: 35505 - RNA, 22 nt, synthetic construct
  source 1..22: mol_type = other RNA
ctgcttggggatgacccaaaag

SEQ ID NO: 35506 - RNA, 22 nt, synthetic construct
  source 1..22: mol_type = other RNA
ctggatccagaaacctgtggtg

SEQ ID NO: 35507 - RNA, 22 nt, synthetic construct
  source 1..22: mol_type = other RNA
ctggatccagcccctgacaggc

SEQ ID NO: 35508 - RNA, 22 nt, synthetic construct
  source 1..22: mol_type = other RNA
ctggcaaacttacatccattgt

SEQ ID NO: 35509 - RNA, 22 nt, synthetic construct
  source 1..22: mol_type = other RNA
ctgtcaggggctggatccagaa

SEQ ID NO: 35510 - RNA, 22 nt, synthetic construct
  source 1..22: mol_type = other RNA
ctgtggtgcctccttctctttt

SEQ ID NO: 35511 - RNA, 22 nt, synthetic construct
  source 1..22: mol_type = other RNA
cttaaacttccttgggatcttg

SEQ ID NO: 35512 - RNA, 22 nt, synthetic construct
  source 1..22: mol_type = other RNA
cttacatccattgtagtacatg

SEQ ID NO: 35513 - RNA, 22 nt, synthetic construct
  source 1..22: mol_type = other RNA
cttccttgggatcttgcttctg

SEQ ID NO: 35514 - RNA, 22 nt, synthetic construct
  source 1..22: mol_type = other RNA
cttctcttttggttgttcatgg

SEQ ID NO: 35515 - RNA, 22 nt, synthetic construct
  source 1..22: mol_type = other RNA
cttctggcaaacttacatccat

SEQ ID NO: 35516 - RNA, 22 nt, synthetic construct
  source 1..22: mol_type = other RNA
cttgcgcctgtcaggggctgga

SEQ ID NO: 35517 - RNA, 22 nt, synthetic construct
  source 1..22: mol_type = other RNA
cttgcttctggcaaacttacat

SEQ ID NO: 35518 - RNA, 22 nt, synthetic construct
  source 1..22: mol_type = other RNA
cttgggatcttgcttctggcaa

SEQ ID NO: 35519 - RNA, 22 nt, synthetic construct
  source 1..22: mol_type = other RNA
cttggggatgacccaaaagagg

SEQ ID NO: 35520 - RNA, 22 nt, synthetic construct
  source 1..22: mol_type = other RNA
cttttgatttttcaggagaact

SEQ ID NO: 35521 - RNA, 22 nt, synthetic construct
  source 1..22: mol_type = other RNA
cttttgggtcatccccaagcag

SEQ ID NO: 35522 - RNA, 22 nt, synthetic construct
  source 1..22: mol_type = other RNA
cttttggttgttcatggagcat

SEQ ID NO: 35523 - RNA, 22 nt, synthetic construct
  source 1..22: mol_type = other RNA
gaaaaatcaaaagaccaaattc

SEQ ID NO: 35524 - RNA, 22 nt, synthetic construct
  source 1..22: mol_type = other RNA
gaaacctgtggtgcctccttct

SEQ ID NO: 35525 - RNA, 22 nt, synthetic construct
  source 1..22: mol_type = other RNA
gaacaaccaaaagagaaggagg

SEQ ID NO: 35526 - RNA, 22 nt, synthetic construct
  source 1..22: mol_type = other RNA
gaacttgcgcctgtcaggggct

SEQ ID NO: 35527 - RNA, 22 nt, synthetic construct
  source 1..22: mol_type = other RNA
gaagcaagatcccaaggaagtt

SEQ ID NO: 35528 - RNA, 22 nt, synthetic construct
  source 1..22: mol_type = other RNA
gaaggaggcaccacaggtttct

SEQ ID NO: 35529 - RNA, 22 nt, synthetic construct
  source 1..22: mol_type = other RNA
gaagtaaacaaacctcttttgg

SEQ ID NO: 35530 - RNA, 22 nt, synthetic construct
  source 1..22: mol_type = other RNA
gaagtttaagctgcttggggat

SEQ ID NO: 35531 - RNA, 22 nt, synthetic construct
  source 1..22: mol_type = other RNA
gaatttggtcttttgatttttc

SEQ ID NO: 35532 - RNA, 22 nt, synthetic construct
  source 1..22: mol_type = other RNA
gacaggcgcaagttctcctgaa

SEQ ID NO: 35533 - RNA, 22 nt, synthetic construct
  source 1..22: mol_type = other RNA
gacccaaaagaggtttgtttac

SEQ ID NO: 35534 - RNA, 22 nt, synthetic construct
  source 1..22: mol_type = other RNA
gagaacttgcgcctgtcagggg

SEQ ID NO: 35535 - RNA, 22 nt, synthetic construct
  source 1..22: mol_type = other RNA
gagaaggaggcaccacaggttt

SEQ ID NO: 35536 - RNA, 22 nt, synthetic construct
  source 1..22: mol_type = other RNA
gagcatgtactacaatggatgt

SEQ ID NO: 35537 - RNA, 22 nt, synthetic construct
  source 1..22: mol_type = other RNA
gaggcaccacaggtttctggat

SEQ ID NO: 35538 - RNA, 22 nt, synthetic construct
  source 1..22: mol_type = other RNA
gaggtttgtttacttcctgatg

SEQ ID NO: 35539 - RNA, 22 nt, synthetic construct
  source 1..22: mol_type = other RNA
gatccagaaacctgtggtgcct

SEQ ID NO: 35540 - RNA, 22 nt, synthetic construct
  source 1..22: mol_type = other RNA
gatccagcccctgacaggcgca

SEQ ID NO: 35541 - RNA, 22 nt, synthetic construct
  source 1..22: mol_type = other RNA
gatcccaaggaagtttaagctg

SEQ ID NO: 35542 - RNA, 22 nt, synthetic construct
  source 1..22: mol_type = other RNA
gatcttgcttctggcaaactta

SEQ ID NO: 35543 - RNA, 22 nt, synthetic construct
  source 1..22: mol_type = other RNA
gatgacccaaaagaggtttgtt

SEQ ID NO: 35544 - RNA, 22 nt, synthetic construct
  source 1..22: mol_type = other RNA
gatgtaagtttgccagaagcaa

SEQ ID NO: 35545 - RNA, 22 nt, synthetic construct
  source 1..22: mol_type = other RNA
gattatacatcaggaagtaaac

SEQ ID NO: 35546 - RNA, 22 nt, synthetic construct
  source 1..22: mol_type = other RNA
gatttttcaggagaacttgcgc

SEQ ID NO: 35547 - RNA, 22 nt, synthetic construct
  source 1..22: mol_type = other RNA
gcaaacttacatccattgtagt

SEQ ID NO: 35548 - RNA, 22 nt, synthetic construct
  source 1..22: mol_type = other RNA
gcaagatcccaaggaagtttaa

SEQ ID NO: 35549 - RNA, 22 nt, synthetic construct
  source 1..22: mol_type = other RNA
gcaagttctcctgaaaaatcaa

SEQ ID NO: 35550 - RNA, 22 nt, synthetic construct
  source 1..22: mol_type = other RNA
gcaatgaatttggtcttttgat

SEQ ID NO: 35551 - RNA, 22 nt, synthetic construct
  source 1..22: mol_type = other RNA
gcaccacaggtttctggatcca

SEQ ID NO: 35552 - RNA, 22 nt, synthetic construct
  source 1..22: mol_type = other RNA
gcagcttaaacttccttgggat

SEQ ID NO: 35553 - RNA, 22 nt, synthetic construct
  source 1..22: mol_type = other RNA
gcatgtactacaatggatgtaa

SEQ ID NO: 35554 - RNA, 22 nt, synthetic construct
  source 1..22: mol_type = other RNA
gccagaagcaagatcccaagga

SEQ ID NO: 35555 - RNA, 22 nt, synthetic construct
  source 1..22: mol_type = other RNA
gcccctgacaggcgcaagttct

SEQ ID NO: 35556 - RNA, 22 nt, synthetic construct
  source 1..22: mol_type = other RNA
gcctccttctcttttggttgtt

SEQ ID NO: 35557 - RNA, 22 nt, synthetic construct
  source 1..22: mol_type = other RNA
gcctgtcaggggctggatccag

SEQ ID NO: 35558 - RNA, 22 nt, synthetic construct
  source 1..22: mol_type = other RNA
gcgattatacatcaggaagtaa

SEQ ID NO: 35559 - RNA, 22 nt, synthetic construct
  source 1..22: mol_type = other RNA
gcgcaagttctcctgaaaaatc

SEQ ID NO: 35560 - RNA, 22 nt, synthetic construct
  source 1..22: mol_type = other RNA
gcgcctgtcaggggctggatcc

SEQ ID NO: 35561 - RNA, 22 nt, synthetic construct
  source 1..22: mol_type = other RNA
gctatccatagcaatgaatttg

SEQ ID NO: 35562 - RNA, 22 nt, synthetic construct
  source 1..22: mol_type = other RNA
gctccatgaacaaccaaaagag

SEQ ID NO: 35563 - RNA, 22 nt, synthetic construct
  source 1..22: mol_type = other RNA
gctgcttggggatgacccaaaa

SEQ ID NO: 35564 - RNA, 22 nt, synthetic construct
  source 1..22: mol_type = other RNA
gctggatccagaaacctgtggt

SEQ ID NO: 35565 - RNA, 22 nt, synthetic construct
  source 1..22: mol_type = other RNA
gcttaaacttccttgggatctt

SEQ ID NO: 35566 - RNA, 22 nt, synthetic construct
  source 1..22: mol_type = other RNA
gcttctggcaaacttacatcca

SEQ ID NO: 35567 - RNA, 22 nt, synthetic construct
  source 1..22: mol_type = other RNA
gcttggggatgacccaaaagag

SEQ ID NO: 35568 - RNA, 22 nt, synthetic construct
  source 1..22: mol_type = other RNA
ggaagtaaacaaacctcttttg

SEQ ID NO: 35569 - RNA, 22 nt, synthetic construct
  source 1..22: mol_type = other RNA
ggaagtttaagctgcttgggga

SEQ ID NO: 35570 - RNA, 22 nt, synthetic construct
  source 1..22: mol_type = other RNA
ggagaacttgcgcctgtcaggg

SEQ ID NO: 35571 - RNA, 22 nt, synthetic construct
  source 1..22: mol_type = other RNA
ggagcatgtactacaatggatg

SEQ ID NO: 35572 - RNA, 22 nt, synthetic construct
  source 1..22: mol_type = other RNA
ggaggcaccacaggtttctgga

SEQ ID NO: 35573 - RNA, 22 nt, synthetic construct
  source 1..22: mol_type = other RNA
ggatccagaaacctgtggtgcc

SEQ ID NO: 35574 - RNA, 22 nt, synthetic construct
  source 1..22: mol_type = other RNA
ggatccagcccctgacaggcgc

SEQ ID NO: 35575 - RNA, 22 nt, synthetic construct
  source 1..22: mol_type = other RNA
ggatcttgcttctggcaaactt

SEQ ID NO: 35576 - RNA, 22 nt, synthetic construct
  source 1..22: mol_type = other RNA
ggatgacccaaaagaggtttgt

SEQ ID NO: 35577 - RNA, 22 nt, synthetic construct
  source 1..22: mol_type = other RNA
ggatgtaagtttgccagaagca

SEQ ID NO: 35578 - RNA, 22 nt, synthetic construct
  source 1..22: mol_type = other RNA
ggcaaacttacatccattgtag

SEQ ID NO: 35579 - RNA, 22 nt, synthetic construct
  source 1..22: mol_type = other RNA
ggcaccacaggtttctggatcc

SEQ ID NO: 35580 - RNA, 22 nt, synthetic construct
  source 1..22: mol_type = other RNA
ggcgcaagttctcctgaaaaat

SEQ ID NO: 35581 - RNA, 22 nt, synthetic construct
  source 1..22: mol_type = other RNA
ggctggatccagaaacctgtgg

SEQ ID NO: 35582 - RNA, 22 nt, synthetic construct
  source 1..22: mol_type = other RNA
gggatcttgcttctggcaaact

SEQ ID NO: 35583 - RNA, 22 nt, synthetic construct
  source 1..22: mol_type = other RNA
gggatgacccaaaagaggtttg

SEQ ID NO: 35584 - RNA, 22 nt, synthetic construct
  source 1..22: mol_type = other RNA
gggctggatccagaaacctgtg

SEQ ID NO: 35585 - RNA, 22 nt, synthetic construct
  source 1..22: mol_type = other RNA
ggggatgacccaaaagaggttt

SEQ ID NO: 35586 - RNA, 22 nt, synthetic construct
  source 1..22: mol_type = other RNA
ggggctggatccagaaacctgt

SEQ ID NO: 35587 - RNA, 22 nt, synthetic construct
  source 1..22: mol_type = other RNA
gggtcatccccaagcagcttaa

SEQ ID NO: 35588 - RNA, 22 nt, synthetic construct
  source 1..22: mol_type = other RNA
ggtcatccccaagcagcttaaa

SEQ ID NO: 35589 - RNA, 22 nt, synthetic construct
  source 1..22: mol_type = other RNA
ggtcttttgatttttcaggaga

SEQ ID NO: 35590 - RNA, 22 nt, synthetic construct
  source 1..22: mol_type = other RNA
ggtgcctccttctcttttggtt

SEQ ID NO: 35591 - RNA, 22 nt, synthetic construct
  source 1..22: mol_type = other RNA
ggttgttcatggagcatgtact

SEQ ID NO: 35592 - RNA, 22 nt, synthetic construct
  source 1..22: mol_type = other RNA
ggtttctggatccagcccctga

SEQ ID NO: 35593 - RNA, 22 nt, synthetic construct
  source 1..22: mol_type = other RNA
ggtttgtttacttcctgatgta

SEQ ID NO: 35594 - RNA, 22 nt, synthetic construct
  source 1..22: mol_type = other RNA
gtaaacaaacctcttttgggtc

SEQ ID NO: 35595 - RNA, 22 nt, synthetic construct
  source 1..22: mol_type = other RNA
gtaagtttgccagaagcaagat

SEQ ID NO: 35596 - RNA, 22 nt, synthetic construct
  source 1..22: mol_type = other RNA
gtacatgctccatgaacaacca

SEQ ID NO: 35597 - RNA, 22 nt, synthetic construct
  source 1..22: mol_type = other RNA
gtactacaatggatgtaagttt

SEQ ID NO: 35598 - RNA, 22 nt, synthetic construct
  source 1..22: mol_type = other RNA
gtagtacatgctccatgaacaa

SEQ ID NO: 35599 - RNA, 22 nt, synthetic construct
  source 1..22: mol_type = other RNA
gtcaggggctggatccagaaac

SEQ ID NO: 35600 - RNA, 22 nt, synthetic construct
  source 1..22: mol_type = other RNA
gtcatccccaagcagcttaaac

SEQ ID NO: 35601 - RNA, 22 nt, synthetic construct
  source 1..22: mol_type = other RNA
gtcttttgatttttcaggagaa

SEQ ID NO: 35602 - RNA, 22 nt, synthetic construct
  source 1..22: mol_type = other RNA
gtgcctccttctcttttggttg

SEQ ID NO: 35603 - RNA, 22 nt, synthetic construct
  source 1..22: mol_type = other RNA
gtggtgcctccttctcttttgg

SEQ ID NO: 35604 - RNA, 22 nt, synthetic construct
  source 1..22: mol_type = other RNA
gttcatggagcatgtactacaa

SEQ ID NO: 35605 - RNA, 22 nt, synthetic construct
  source 1..22: mol_type = other RNA
gttctcctgaaaaatcaaaaga

SEQ ID NO: 35606 - RNA, 22 nt, synthetic construct
  source 1..22: mol_type = other RNA
gttgttcatggagcatgtacta

SEQ ID NO: 35607 - RNA, 22 nt, synthetic construct
  source 1..22: mol_type = other RNA
gtttaagctgcttggggatgac

SEQ ID NO: 35608 - RNA, 22 nt, synthetic construct
  source 1..22: mol_type = other RNA
gtttacttcctgatgtataatc

SEQ ID NO: 35609 - RNA, 22 nt, synthetic construct
  source 1..22: mol_type = other RNA
gtttctggatccagcccctgac

SEQ ID NO: 35610 - RNA, 22 nt, synthetic construct
  source 1..22: mol_type = other RNA
gtttgccagaagcaagatccca

SEQ ID NO: 35611 - RNA, 22 nt, synthetic construct
  source 1..22: mol_type = other RNA
gtttgtttacttcctgatgtat

SEQ ID NO: 35612 - RNA, 22 nt, synthetic construct
  source 1..22: mol_type = other RNA
taaacaaacctcttttgggtca

SEQ ID NO: 35613 - RNA, 22 nt, synthetic construct
  source 1..22: mol_type = other RNA
taaacttccttgggatcttgct

SEQ ID NO: 35614 - RNA, 22 nt, synthetic construct
  source 1..22: mol_type = other RNA
taaagcgattatacatcaggaa

SEQ ID NO: 35615 - RNA, 22 nt, synthetic construct
  source 1..22: mol_type = other RNA
taagctgcttggggatgaccca

SEQ ID NO: 35616 - RNA, 22 nt, synthetic construct
  source 1..22: mol_type = other RNA
taagtttgccagaagcaagatc

SEQ ID NO: 35617 - RNA, 22 nt, synthetic construct
  source 1..22: mol_type = other RNA
tacaatggatgtaagtttgcca

SEQ ID NO: 35618 - RNA, 22 nt, synthetic construct
  source 1..22: mol_type = other RNA
tacatcaggaagtaaacaaacc

SEQ ID NO: 35619 - RNA, 22 nt, synthetic construct
  source 1..22: mol_type = other RNA
tacatccattgtagtacatgct

SEQ ID NO: 35620 - RNA, 22 nt, synthetic construct
  source 1..22: mol_type = other RNA
tacatgctccatgaacaaccaa

SEQ ID NO: 35621 - RNA, 22 nt, synthetic construct
  source 1..22: mol_type = other RNA
tactacaatggatgtaagtttg

SEQ ID NO: 35622 - RNA, 22 nt, synthetic construct
  source 1..22: mol_type = other RNA
tacttcctgatgtataatcgct

SEQ ID NO: 35623 - RNA, 22 nt, synthetic construct
  source 1..22: mol_type = other RNA
tagcaatgaatttggtcttttg

SEQ ID NO: 35624 - RNA, 22 nt, synthetic construct
  source 1..22: mol_type = other RNA
tagtacatgctccatgaacaac

SEQ ID NO: 35625 - RNA, 22 nt, synthetic construct
  source 1..22: mol_type = other RNA
tatacatcaggaagtaaacaaa

SEQ ID NO: 35626 - RNA, 22 nt, synthetic construct
  source 1..22: mol_type = other RNA
tatccatagcaatgaatttggt

SEQ ID NO: 35627 - RNA, 22 nt, synthetic construct
  source 1..22: mol_type = other RNA
tcaaaagaccaaattcattgct

SEQ ID NO: 35628 - RNA, 22 nt, synthetic construct
  source 1..22: mol_type = other RNA
tcaggaagtaaacaaacctctt

SEQ ID NO: 35629 - RNA, 22 nt, synthetic construct
  source 1..22: mol_type = other RNA
tcaggagaacttgcgcctgtca

SEQ ID NO: 35630 - RNA, 22 nt, synthetic construct
  source 1..22: mol_type = other RNA
tcaggggctggatccagaaacc

SEQ ID NO: 35631 - RNA, 22 nt, synthetic construct
  source 1..22: mol_type = other RNA
tcatccccaagcagcttaaact

SEQ ID NO: 35632 - RNA, 22 nt, synthetic construct
  source 1..22: mol_type = other RNA
tcatggagcatgtactacaatg

SEQ ID NO: 35633 - RNA, 22 nt, synthetic construct
  source 1..22: mol_type = other RNA
tccagaaacctgtggtgcctcc

SEQ ID NO: 35634 - RNA, 22 nt, synthetic construct
  source 1..22: mol_type = other RNA
tccagcccctgacaggcgcaag

SEQ ID NO: 35635 - RNA, 22 nt, synthetic construct
  source 1..22: mol_type = other RNA
tccatagcaatgaatttggtct

SEQ ID NO: 35636 - RNA, 22 nt, synthetic construct
  source 1..22: mol_type = other RNA
tccatgaacaaccaaaagagaa

SEQ ID NO: 35637 - RNA, 22 nt, synthetic construct
  source 1..22: mol_type = other RNA
tccattgtagtacatgctccat

SEQ ID NO: 35638 - RNA, 22 nt, synthetic construct
  source 1..22: mol_type = other RNA
tcccaaggaagtttaagctgct

SEQ ID NO: 35639 - RNA, 22 nt, synthetic construct
  source 1..22: mol_type = other RNA
tccccaagcagcttaaacttcc

SEQ ID NO: 35640 - RNA, 22 nt, synthetic construct
  source 1..22: mol_type = other RNA
tcctgaaaaatcaaaagaccaa

SEQ ID NO: 35641 - RNA, 22 nt, synthetic construct
  source 1..22: mol_type = other RNA
tccttctcttttggttgttcat

SEQ ID NO: 35642 - RNA, 22 nt, synthetic construct
  source 1..22: mol_type = other RNA
tccttgggatcttgcttctggc

SEQ ID NO: 35643 - RNA, 22 nt, synthetic construct
  source 1..22: mol_type = other RNA
tctcctgaaaaatcaaaagacc

SEQ ID NO: 35644 - RNA, 22 nt, synthetic construct
  source 1..22: mol_type = other RNA
tctcttttggttgttcatggag

SEQ ID NO: 35645 - RNA, 22 nt, synthetic construct
  source 1..22: mol_type = other RNA
tctggatccagcccctgacagg

SEQ ID NO: 35646 - RNA, 22 nt, synthetic construct
  source 1..22: mol_type = other RNA
tctggcaaacttacatccattg

SEQ ID NO: 35647 - RNA, 22 nt, synthetic construct
  source 1..22: mol_type = other RNA
tcttgcttctggcaaacttaca

SEQ ID NO: 35648 - RNA, 22 nt, synthetic construct
  source 1..22: mol_type = other RNA
tcttttgatttttcaggagaac

SEQ ID NO: 35649 - RNA, 22 nt, synthetic construct
  source 1..22: mol_type = other RNA
tcttttgggtcatccccaagca

SEQ ID NO: 35650 - RNA, 22 nt, synthetic construct
  source 1..22: mol_type = other RNA
tcttttggttgttcatggagca

SEQ ID NO: 35651 - RNA, 22 nt, synthetic construct
  source 1..22: mol_type = other RNA
tgaacaaccaaaagagaaggag

SEQ ID NO: 35652 - RNA, 22 nt, synthetic construct
  source 1..22: mol_type = other RNA
tgacaggcgcaagttctcctga

SEQ ID NO: 35653 - RNA, 22 nt, synthetic construct
  source 1..22: mol_type = other RNA
tgacccaaaagaggtttgttta

SEQ ID NO: 35654 - RNA, 22 nt, synthetic construct
  source 1..22: mol_type = other RNA
tgatttttcaggagaacttgcg

SEQ ID NO: 35655 - RNA, 22 nt, synthetic construct
  source 1..22: mol_type = other RNA
tgccagaagcaagatcccaagg

SEQ ID NO: 35656 - RNA, 22 nt, synthetic construct
  source 1..22: mol_type = other RNA
tgcctccttctcttttggttgt

SEQ ID NO: 35657 - RNA, 22 nt, synthetic construct
  source 1..22: mol_type = other RNA
tgcgcctgtcaggggctggatc

SEQ ID NO: 35658 - RNA, 22 nt, synthetic construct
  source 1..22: mol_type = other RNA
tgctccatgaacaaccaaaaga

SEQ ID NO: 35659 - RNA, 22 nt, synthetic construct
  source 1..22: mol_type = other RNA
tgcttctggcaaacttacatcc

SEQ ID NO: 35660 - RNA, 22 nt, synthetic construct
  source 1..22: mol_type = other RNA
tgcttggggatgacccaaaaga

SEQ ID NO: 35661 - RNA, 22 nt, synthetic construct
  source 1..22: mol_type = other RNA
tggagcatgtactacaatggat

SEQ ID NO: 35662 - RNA, 22 nt, synthetic construct
  source 1..22: mol_type = other RNA
tggatccagaaacctgtggtgc

SEQ ID NO: 35663 - RNA, 22 nt, synthetic construct
  source 1..22: mol_type = other RNA
tggatccagcccctgacaggcg

SEQ ID NO: 35664 - RNA, 22 nt, synthetic construct
  source 1..22: mol_type = other RNA
tggatgtaagtttgccagaagc

SEQ ID NO: 35665 - RNA, 22 nt, synthetic construct
  source 1..22: mol_type = other RNA
tggcaaacttacatccattgta

SEQ ID NO: 35666 - RNA, 22 nt, synthetic construct
  source 1..22: mol_type = other RNA
tgggatcttgcttctggcaaac

SEQ ID NO: 35667 - RNA, 22 nt, synthetic construct
  source 1..22: mol_type = other RNA
tggggatgacccaaaagaggtt

SEQ ID NO: 35668 - RNA, 22 nt, synthetic construct
  source 1..22: mol_type = other RNA
tgggtcatccccaagcagctta

SEQ ID NO: 35669 - RNA, 22 nt, synthetic construct
  source 1..22: mol_type = other RNA
tggtcttttgatttttcaggag

SEQ ID NO: 35670 - RNA, 22 nt, synthetic construct
  source 1..22: mol_type = other RNA
tggtgcctccttctcttttggt

SEQ ID NO: 35671 - RNA, 22 nt, synthetic construct
  source 1..22: mol_type = other RNA
tggttgttcatggagcatgtac

SEQ ID NO: 35672 - RNA, 22 nt, synthetic construct
  source 1..22: mol_type = other RNA
tgtaagtttgccagaagcaaga

SEQ ID NO: 35673 - RNA, 22 nt, synthetic construct
  source 1..22: mol_type = other RNA
tgtactacaatggatgtaagtt

SEQ ID NO: 35674 - RNA, 22 nt, synthetic construct
  source 1..22: mol_type = other RNA
tgtagtacatgctccatgaaca

SEQ ID NO: 35675 - RNA, 22 nt, synthetic construct
  source 1..22: mol_type = other RNA
tgtcaggggctggatccagaaa

SEQ ID NO: 35676 - RNA, 22 nt, synthetic construct
  source 1..22: mol_type = other RNA
tgtggtgcctccttctcttttg

SEQ ID NO: 35677 - RNA, 22 nt, synthetic construct
  source 1..22: mol_type = other RNA
tgttcatggagcatgtactaca

SEQ ID NO: 35678 - RNA, 22 nt, synthetic construct
  source 1..22: mol_type = other RNA
tgtttacttcctgatgtataat

SEQ ID NO: 35679 - RNA, 22 nt, synthetic construct
  source 1..22: mol_type = other RNA
ttaaacttccttgggatcttgc

SEQ ID NO: 35680 - RNA, 22 nt, synthetic construct
  source 1..22: mol_type = other RNA
ttaagctgcttggggatgaccc

SEQ ID NO: 35681 - RNA, 22 nt, synthetic construct
  source 1..22: mol_type = other RNA
ttacatccattgtagtacatgc

SEQ ID NO: 35682 - RNA, 22 nt, synthetic construct
  source 1..22: mol_type = other RNA
ttacttcctgatgtataatcgc

SEQ ID NO: 35683 - RNA, 22 nt, synthetic construct
  source 1..22: mol_type = other RNA
ttatacatcaggaagtaaacaa

SEQ ID NO: 35684 - RNA, 22 nt, synthetic construct
  source 1..22: mol_type = other RNA
ttcaggagaacttgcgcctgtc

SEQ ID NO: 35685 - RNA, 22 nt, synthetic construct
  source 1..22: mol_type = other RNA
ttcatggagcatgtactacaat

SEQ ID NO: 35686 - RNA, 22 nt, synthetic construct
  source 1..22: mol_type = other RNA
ttccttgggatcttgcttctgg

SEQ ID NO: 35687 - RNA, 22 nt, synthetic construct
  source 1..22: mol_type = other RNA
ttctcctgaaaaatcaaaagac

SEQ ID NO: 35688 - RNA, 22 nt, synthetic construct
  source 1..22: mol_type = other RNA
ttctcttttggttgttcatgga

SEQ ID NO: 35689 - RNA, 22 nt, synthetic construct
  source 1..22: mol_type = other RNA
ttctggatccagcccctgacag

SEQ ID NO: 35690 - RNA, 22 nt, synthetic construct
  source 1..22: mol_type = other RNA
ttctggcaaacttacatccatt

SEQ ID NO: 35691 - RNA, 22 nt, synthetic construct
  source 1..22: mol_type = other RNA
ttgatttttcaggagaacttgc

SEQ ID NO: 35692 - RNA, 22 nt, synthetic construct
  source 1..22: mol_type = other RNA
ttgccagaagcaagatcccaag

SEQ ID NO: 35693 - RNA, 22 nt, synthetic construct
  source 1..22: mol_type = other RNA
ttgcgcctgtcaggggctggat

SEQ ID NO: 35694 - RNA, 22 nt, synthetic construct
  source 1..22: mol_type = other RNA
ttgcttctggcaaacttacatc

SEQ ID NO: 35695 - RNA, 22 nt, synthetic construct
  source 1..22: mol_type = other RNA
ttgggatcttgcttctggcaaa

SEQ ID NO: 35696 - RNA, 22 nt, synthetic construct
  source 1..22: mol_type = other RNA
ttggggatgacccaaaagaggt

SEQ ID NO: 35697 - RNA, 22 nt, synthetic construct
  source 1..22: mol_type = other RNA
ttgggtcatccccaagcagctt

SEQ ID NO: 35698 - RNA, 22 nt, synthetic construct
  source 1..22: mol_type = other RNA
ttggtcttttgatttttcagga

SEQ ID NO: 35699 - RNA, 22 nt, synthetic construct
  source 1..22: mol_type = other RNA
ttggttgttcatggagcatgta

SEQ ID NO: 35700 - RNA, 22 nt, synthetic construct
  source 1..22: mol_type = other RNA
ttgtagtacatgctccatgaac

SEQ ID NO: 35701 - RNA, 22 nt, synthetic construct
  source 1..22: mol_type = other RNA
ttgttcatggagcatgtactac

SEQ ID NO: 35702 - RNA, 22 nt, synthetic construct
  source 1..22: mol_type = other RNA
ttgtttacttcctgatgtataa

SEQ ID NO: 35703 - RNA, 22 nt, synthetic construct
  source 1..22: mol_type = other RNA
tttaagctgcttggggatgacc

SEQ ID NO: 35704 - RNA, 22 nt, synthetic construct
  source 1..22: mol_type = other RNA
tttacttcctgatgtataatcg

SEQ ID NO: 35705 - RNA, 22 nt, synthetic construct
  source 1..22: mol_type = other RNA
tttcaggagaacttgcgcctgt

SEQ ID NO: 35706 - RNA, 22 nt, synthetic construct
  source 1..22: mol_type = other RNA
tttctggatccagcccctgaca

SEQ ID NO: 35707 - RNA, 22 nt, synthetic construct
  source 1..22: mol_type = other RNA
tttgatttttcaggagaacttg

SEQ ID NO: 35708 - RNA, 22 nt, synthetic construct
  source 1..22: mol_type = other RNA
tttgccagaagcaagatcccaa

SEQ ID NO: 35709 - RNA, 22 nt, synthetic construct
  source 1..22: mol_type = other RNA
tttgggtcatccccaagcagct

SEQ ID NO: 35710 - RNA, 22 nt, synthetic construct
  source 1..22: mol_type = other RNA
tttggtcttttgatttttcagg

SEQ ID NO: 35711 - RNA, 22 nt, synthetic construct
  source 1..22: mol_type = other RNA
tttggttgttcatggagcatgt

SEQ ID NO: 35712 - RNA, 22 nt, synthetic construct
  source 1..22: mol_type = other RNA
tttgtttacttcctgatgtata

SEQ ID NO: 35713 - RNA, 22 nt, synthetic construct
  source 1..22: mol_type = other RNA
ttttcaggagaacttgcgcctg

SEQ ID NO: 35714 - RNA, 22 nt, synthetic construct
  source 1..22: mol_type = other RNA
ttttgatttttcaggagaactt

SEQ ID NO: 35715 - RNA, 22 nt, synthetic construct
  source 1..22: mol_type = other RNA
ttttgggtcatccccaagcagc

SEQ ID NO: 35716 - RNA, 22 nt, synthetic construct
  source 1..22: mol_type = other RNA
ttttggttgttcatggagcatg

SEQ ID NO: 35717 - RNA, 22 nt, synthetic construct
  source 1..22: mol_type = other RNA
tttttcaggagaacttgcgcct

SEQ ID NO: 35718 - RNA, 20 nt, synthetic construct
  source 1..20: mol_type = other RNA
aaaacctgtccactcttatg

SEQ ID NO: 35719 - RNA, 20 nt, synthetic construct
  source 1..20: mol_type = other RNA
aaacctgtccactcttatgg

SEQ ID NO: 35720 - RNA, 20 nt, synthetic construct
  source 1..20: mol_type = other RNA
aaactggagtctcatttgca

SEQ ID NO: 35721 - RNA, 20 nt, synthetic construct
  source 1..20: mol_type = other RNA
aaacttgcacctgatgcata

SEQ ID NO: 35722 - RNA, 20 nt, synthetic construct
  source 1..20: mol_type = other RNA
aaataatcattggcagcaat

SEQ ID NO: 35723 - RNA, 20 nt, synthetic construct
  source 1..20: mol_type = other RNA
aaatgagactccagtttctc

SEQ ID NO: 35724 - RNA, 20 nt, synthetic construct
  source 1..20: mol_type = other RNA
aacatataagaaacttgcac

SEQ ID NO: 35725 - RNA, 20 nt, synthetic construct
  source 1..20: mol_type = other RNA
aacctgtccactcttatggc

SEQ ID NO: 35726 - RNA, 20 nt, synthetic construct
  source 1..20: mol_type = other RNA
aactggagtctcatttgcaa

SEQ ID NO: 35727 - RNA, 20 nt, synthetic construct
  source 1..20: mol_type = other RNA
aacttgcacctgatgcatat

SEQ ID NO: 35728 - RNA, 20 nt, synthetic construct
  source 1..20: mol_type = other RNA
aagaaacttgcacctgatgc

SEQ ID NO: 35729 - RNA, 20 nt, synthetic construct
  source 1..20: mol_type = other RNA
aagagaaactggagtctcat

SEQ ID NO: 35730 - RNA, 20 nt, synthetic construct
  source 1..20: mol_type = other RNA
aagagtggacaggttttgca

SEQ ID NO: 35731 - RNA, 20 nt, synthetic construct
  source 1..20: mol_type = other RNA
aagtttaaataatcattggc

SEQ ID NO: 35732 - RNA, 20 nt, synthetic construct
  source 1..20: mol_type = other RNA
aagtttcttatatgttggtg

SEQ ID NO: 35733 - RNA, 20 nt, synthetic construct
  source 1..20: mol_type = other RNA
aataatcattggcagcaatt

SEQ ID NO: 35734 - RNA, 20 nt, synthetic construct
  source 1..20: mol_type = other RNA
aatgagactccagtttctct

SEQ ID NO: 35735 - RNA, 20 nt, synthetic construct
  source 1..20: mol_type = other RNA
aattattcactttatacagg

SEQ ID NO: 35736 - RNA, 20 nt, synthetic construct
  source 1..20: mol_type = other RNA
aattgctgccaatgattatt

SEQ ID NO: 35737 - RNA, 20 nt, synthetic construct
  source 1..20: mol_type = other RNA
acaattgctgccaatgatta

SEQ ID NO: 35738 - RNA, 20 nt, synthetic construct
  source 1..20: mol_type = other RNA
acaggaagagaaactggagt

SEQ ID NO: 35739 - RNA, 20 nt, synthetic construct
  source 1..20: mol_type = other RNA
acaggttttgcaaatgagac

SEQ ID NO: 35740 - RNA, 20 nt, synthetic construct
  source 1..20: mol_type = other RNA
acatataagaaacttgcacc

SEQ ID NO: 35741 - RNA, 20 nt, synthetic construct
  source 1..20: mol_type = other RNA
accaacatataagaaacttg

SEQ ID NO: 35742 - RNA, 20 nt, synthetic construct
  source 1..20: mol_type = other RNA
acctgatgcatataataatc

SEQ ID NO: 35743 - RNA, 20 nt, synthetic construct
  source 1..20: mol_type = other RNA
acctgattattatatgcatc

SEQ ID NO: 35744 - RNA, 20 nt, synthetic construct
  source 1..20: mol_type = other RNA
acctgtccactcttatggca

SEQ ID NO: 35745 - RNA, 20 nt, synthetic construct
  source 1..20: mol_type = other RNA
actccagtttctcttcctgt

SEQ ID NO: 35746 - RNA, 20 nt, synthetic construct
  source 1..20: mol_type = other RNA
actcttatggcaccaacata

SEQ ID NO: 35747 - RNA, 20 nt, synthetic construct
  source 1..20: mol_type = other RNA
actggagtctcatttgcaaa

SEQ ID NO: 35748 - RNA, 20 nt, synthetic construct
  source 1..20: mol_type = other RNA
acttacctgattattatatg

SEQ ID NO: 35749 - RNA, 20 nt, synthetic construct
  source 1..20: mol_type = other RNA
acttgcacctgatgcatata

SEQ ID NO: 35750 - RNA, 20 nt, synthetic construct
  source 1..20: mol_type = other RNA
actttatacaggaagagaaa

SEQ ID NO: 35751 - RNA, 20 nt, synthetic construct
  source 1..20: mol_type = other RNA
agaaactggagtctcatttg

SEQ ID NO: 35752 - RNA, 20 nt, synthetic construct
  source 1..20: mol_type = other RNA
agaaacttgcacctgatgca

SEQ ID NO: 35753 - RNA, 20 nt, synthetic construct
  source 1..20: mol_type = other RNA
agactccagtttctcttcct

SEQ ID NO: 35754 - RNA, 20 nt, synthetic construct
  source 1..20: mol_type = other RNA
agagaaactggagtctcatt

SEQ ID NO: 35755 - RNA, 20 nt, synthetic construct
  source 1..20: mol_type = other RNA
agagtggacaggttttgcaa

SEQ ID NO: 35756 - RNA, 20 nt, synthetic construct
  source 1..20: mol_type = other RNA
aggaagagaaactggagtct

SEQ ID NO: 35757 - RNA, 20 nt, synthetic construct
  source 1..20: mol_type = other RNA
aggtgcaagtttcttatatg

SEQ ID NO: 35758 - RNA, 20 nt, synthetic construct
  source 1..20: mol_type = other RNA
aggttttgcaaatgagactc

SEQ ID NO: 35759 - RNA, 20 nt, synthetic construct
  source 1..20: mol_type = other RNA
agtctcatttgcaaaacctg

SEQ ID NO: 35760 - RNA, 20 nt, synthetic construct
  source 1..20: mol_type = other RNA
agtggacaggttttgcaaat

SEQ ID NO: 35761 - RNA, 20 nt, synthetic construct
  source 1..20: mol_type = other RNA
agttgttacaattgctgcca

SEQ ID NO: 35762 - RNA, 20 nt, synthetic construct
  source 1..20: mol_type = other RNA
agtttaaataatcattggca

SEQ ID NO: 35763 - RNA, 20 nt, synthetic construct
  source 1..20: mol_type = other RNA
agtttctcttcctgtataaa

SEQ ID NO: 35764 - RNA, 20 nt, synthetic construct
  source 1..20: mol_type = other RNA
agtttcttatatgttggtgc

SEQ ID NO: 35765 - RNA, 20 nt, synthetic construct
  source 1..20: mol_type = other RNA
ataagaaacttgcacctgat

SEQ ID NO: 35766 - RNA, 20 nt, synthetic construct
  source 1..20: mol_type = other RNA
ataagagtggacaggttttg

SEQ ID NO: 35767 - RNA, 20 nt, synthetic construct
  source 1..20: mol_type = other RNA
ataatcattggcagcaattg

SEQ ID NO: 35768 - RNA, 20 nt, synthetic construct
  source 1..20: mol_type = other RNA
atacaggaagagaaactgga

SEQ ID NO: 35769 - RNA, 20 nt, synthetic construct
  source 1..20: mol_type = other RNA
atataagaaacttgcacctg

SEQ ID NO: 35770 - RNA, 20 nt, synthetic construct
  source 1..20: mol_type = other RNA
atatgcatcaggtgcaagtt

SEQ ID NO: 35771 - RNA, 20 nt, synthetic construct
  source 1..20: mol_type = other RNA
atatgttggtgccataagag

SEQ ID NO: 35772 - RNA, 20 nt, synthetic construct
  source 1..20: mol_type = other RNA
atcaggtgcaagtttcttat

SEQ ID NO: 35773 - RNA, 20 nt, synthetic construct
  source 1..20: mol_type = other RNA
atgagactccagtttctctt

SEQ ID NO: 35774 - RNA, 20 nt, synthetic construct
  source 1..20: mol_type = other RNA
atgcatataataatcaggta

SEQ ID NO: 35775 - RNA, 20 nt, synthetic construct
  source 1..20: mol_type = other RNA
atgcatcaggtgcaagtttc

SEQ ID NO: 35776 - RNA, 20 nt, synthetic construct
  source 1..20: mol_type = other RNA
atggcaccaacatataagaa

SEQ ID NO: 35777 - RNA, 20 nt, synthetic construct
  source 1..20: mol_type = other RNA
atgttggtgccataagagtg

SEQ ID NO: 35778 - RNA, 20 nt, synthetic construct
  source 1..20: mol_type = other RNA
attatatgcatcaggtgcaa

SEQ ID NO: 35779 - RNA, 20 nt, synthetic construct
  source 1..20: mol_type = other RNA
attattatatgcatcaggtg

SEQ ID NO: 35780 - RNA, 20 nt, synthetic construct
  source 1..20: mol_type = other RNA
attattcactttatacagga

SEQ ID NO: 35781 - RNA, 20 nt, synthetic construct
  source 1..20: mol_type = other RNA
attcactttatacaggaaga

SEQ ID NO: 35782 - RNA, 20 nt, synthetic construct
  source 1..20: mol_type = other RNA
attgctgccaatgattattt

SEQ ID NO: 35783 - RNA, 20 nt, synthetic construct
  source 1..20: mol_type = other RNA
atttgcaaaacctgtccact

SEQ ID NO: 35784 - RNA, 20 nt, synthetic construct
  source 1..20: mol_type = other RNA
caaaacctgtccactcttat

SEQ ID NO: 35785 - RNA, 20 nt, synthetic construct
  source 1..20: mol_type = other RNA
caaatgagactccagtttct

SEQ ID NO: 35786 - RNA, 20 nt, synthetic construct
  source 1..20: mol_type = other RNA
caacatataagaaacttgca

SEQ ID NO: 35787 - RNA, 20 nt, synthetic construct
  source 1..20: mol_type = other RNA
caagtttcttatatgttggt

SEQ ID NO: 35788 - RNA, 20 nt, synthetic construct
  source 1..20: mol_type = other RNA
caattgctgccaatgattat

SEQ ID NO: 35789 - RNA, 20 nt, synthetic construct
  source 1..20: mol_type = other RNA
caccaacatataagaaactt

SEQ ID NO: 35790 - RNA, 20 nt, synthetic construct
  source 1..20: mol_type = other RNA
cacctgatgcatataataat

SEQ ID NO: 35791 - RNA, 20 nt, synthetic construct
  source 1..20: mol_type = other RNA
cactcttatggcaccaacat

SEQ ID NO: 35792 - RNA, 20 nt, synthetic construct
  source 1..20: mol_type = other RNA
cactttatacaggaagagaa

SEQ ID NO: 35793 - RNA, 20 nt, synthetic construct
  source 1..20: mol_type = other RNA
caggaagagaaactggagtc

SEQ ID NO: 35794 - RNA, 20 nt, synthetic construct
  source 1..20: mol_type = other RNA
caggtaagtttaaataatca

SEQ ID NO: 35795 - RNA, 20 nt, synthetic construct
  source 1..20: mol_type = other RNA
caggtgcaagtttcttatat

SEQ ID NO: 35796 - RNA, 20 nt, synthetic construct
  source 1..20: mol_type = other RNA
caggttttgcaaatgagact

SEQ ID NO: 35797 - RNA, 20 nt, synthetic construct
  source 1..20: mol_type = other RNA
cagtttctcttcctgtataa

SEQ ID NO: 35798 - RNA, 20 nt, synthetic construct
  source 1..20: mol_type = other RNA
cataagagtggacaggtttt

SEQ ID NO: 35799 - RNA, 20 nt, synthetic construct
  source 1..20: mol_type = other RNA
catataagaaacttgcacct

SEQ ID NO: 35800 - RNA, 20 nt, synthetic construct
  source 1..20: mol_type = other RNA
catataataatcaggtaagt

SEQ ID NO: 35801 - RNA, 20 nt, synthetic construct
  source 1..20: mol_type = other RNA
catcaggtgcaagtttctta

SEQ ID NO: 35802 - RNA, 20 nt, synthetic construct
  source 1..20: mol_type = other RNA
catttgcaaaacctgtccac

SEQ ID NO: 35803 - RNA, 20 nt, synthetic construct
  source 1..20: mol_type = other RNA
ccaacatataagaaacttgc

SEQ ID NO: 35804 - RNA, 20 nt, synthetic construct
  source 1..20: mol_type = other RNA
ccactcttatggcaccaaca

SEQ ID NO: 35805 - RNA, 20 nt, synthetic construct
  source 1..20: mol_type = other RNA
ccagtttctcttcctgtata

SEQ ID NO: 35806 - RNA, 20 nt, synthetic construct
  source 1..20: mol_type = other RNA
ccataagagtggacaggttt

SEQ ID NO: 35807 - RNA, 20 nt, synthetic construct
  source 1..20: mol_type = other RNA
cctgatgcatataataatca

SEQ ID NO: 35808 - RNA, 20 nt, synthetic construct
  source 1..20: mol_type = other RNA
cctgattattatatgcatca

SEQ ID NO: 35809 - RNA, 20 nt, synthetic construct
  source 1..20: mol_type = other RNA
cctgtataaagtgaataatt

SEQ ID NO: 35810 - RNA, 20 nt, synthetic construct
  source 1..20: mol_type = other RNA
cctgtccactcttatggcac

SEQ ID NO: 35811 - RNA, 20 nt, synthetic construct
  source 1..20: mol_type = other RNA
ctcatttgcaaaacctgtcc

SEQ ID NO: 35812 - RNA, 20 nt, synthetic construct
  source 1..20: mol_type = other RNA
ctccagtttctcttcctgta

SEQ ID NO: 35813 - RNA, 20 nt, synthetic construct
  source 1..20: mol_type = other RNA
ctcttatggcaccaacatat

SEQ ID NO: 35814 - RNA, 20 nt, synthetic construct
  source 1..20: mol_type = other RNA
ctcttcctgtataaagtgaa

SEQ ID NO: 35815 - RNA, 20 nt, synthetic construct
  source 1..20: mol_type = other RNA
ctgatgcatataataatcag

SEQ ID NO: 35816 - RNA, 20 nt, synthetic construct
  source 1..20: mol_type = other RNA
ctgattattatatgcatcag

SEQ ID NO: 35817 - RNA, 20 nt, synthetic construct
  source 1..20: mol_type = other RNA
ctgccaatgattatttaaac

SEQ ID NO: 35818 - RNA, 20 nt, synthetic construct
  source 1..20: mol_type = other RNA
ctggagtctcatttgcaaaa

SEQ ID NO: 35819 - RNA, 20 nt, synthetic construct
  source 1..20: mol_type = other RNA
ctgtataaagtgaataattc

SEQ ID NO: 35820 - RNA, 20 nt, synthetic construct
  source 1..20: mol_type = other RNA
ctgtccactcttatggcacc

SEQ ID NO: 35821 - RNA, 20 nt, synthetic construct
  source 1..20: mol_type = other RNA
cttacctgattattatatgc

SEQ ID NO: 35822 - RNA, 20 nt, synthetic construct
  source 1..20: mol_type = other RNA
cttatatgttggtgccataa

SEQ ID NO: 35823 - RNA, 20 nt, synthetic construct
  source 1..20: mol_type = other RNA
cttatggcaccaacatataa

SEQ ID NO: 35824 - RNA, 20 nt, synthetic construct
  source 1..20: mol_type = other RNA
cttcctgtataaagtgaata

SEQ ID NO: 35825 - RNA, 20 nt, synthetic construct
  source 1..20: mol_type = other RNA
cttgcacctgatgcatataa

SEQ ID NO: 35826 - RNA, 20 nt, synthetic construct
  source 1..20: mol_type = other RNA
ctttatacaggaagagaaac

SEQ ID NO: 35827 - RNA, 20 nt, synthetic construct
  source 1..20: mol_type = other RNA
gaaactggagtctcatttgc

SEQ ID NO: 35828 - RNA, 20 nt, synthetic construct
  source 1..20: mol_type = other RNA
gaaacttgcacctgatgcat

SEQ ID NO: 35829 - RNA, 20 nt, synthetic construct
  source 1..20: mol_type = other RNA
gaagagaaactggagtctca

SEQ ID NO: 35830 - RNA, 20 nt, synthetic construct
  source 1..20: mol_type = other RNA
gaattattcactttatacag

SEQ ID NO: 35831 - RNA, 20 nt, synthetic construct
  source 1..20: mol_type = other RNA
gacaggttttgcaaatgaga

SEQ ID NO: 35832 - RNA, 20 nt, synthetic construct
  source 1..20: mol_type = other RNA
gactccagtttctcttcctg

SEQ ID NO: 35833 - RNA, 20 nt, synthetic construct
  source 1..20: mol_type = other RNA
gagaaactggagtctcattt

SEQ ID NO: 35834 - RNA, 20 nt, synthetic construct
  source 1..20: mol_type = other RNA
gagactccagtttctcttcc

SEQ ID NO: 35835 - RNA, 20 nt, synthetic construct
  source 1..20: mol_type = other RNA
gagtctcatttgcaaaacct

SEQ ID NO: 35836 - RNA, 20 nt, synthetic construct
  source 1..20: mol_type = other RNA
gagtggacaggttttgcaaa

SEQ ID NO: 35837 - RNA, 20 nt, synthetic construct
  source 1..20: mol_type = other RNA
gatgcatataataatcaggt

SEQ ID NO: 35838 - RNA, 20 nt, synthetic construct
  source 1..20: mol_type = other RNA
gattattatatgcatcaggt

SEQ ID NO: 35839 - RNA, 20 nt, synthetic construct
  source 1..20: mol_type = other RNA
gattatttaaacttacctga

SEQ ID NO: 35840 - RNA, 20 nt, synthetic construct
  source 1..20: mol_type = other RNA
gcaaaacctgtccactctta

SEQ ID NO: 35841 - RNA, 20 nt, synthetic construct
  source 1..20: mol_type = other RNA
gcaaatgagactccagtttc

SEQ ID NO: 35842 - RNA, 20 nt, synthetic construct
  source 1..20: mol_type = other RNA
gcaagtttcttatatgttgg

SEQ ID NO: 35843 - RNA, 20 nt, synthetic construct
  source 1..20: mol_type = other RNA
gcaccaacatataagaaact

SEQ ID NO: 35844 - RNA, 20 nt, synthetic construct
  source 1..20: mol_type = other RNA
gcacctgatgcatataataa

SEQ ID NO: 35845 - RNA, 20 nt, synthetic construct
  source 1..20: mol_type = other RNA
gcatataataatcaggtaag

SEQ ID NO: 35846 - RNA, 20 nt, synthetic construct
  source 1..20: mol_type = other RNA
gcatcaggtgcaagtttctt

SEQ ID NO: 35847 - RNA, 20 nt, synthetic construct
  source 1..20: mol_type = other RNA
gccaatgattatttaaactt

SEQ ID NO: 35848 - RNA, 20 nt, synthetic construct
  source 1..20: mol_type = other RNA
gccataagagtggacaggtt

SEQ ID NO: 35849 - RNA, 20 nt, synthetic construct
  source 1..20: mol_type = other RNA
gctgccaatgattatttaaa

SEQ ID NO: 35850 - RNA, 20 nt, synthetic construct
  source 1..20: mol_type = other RNA
ggaagagaaactggagtctc

SEQ ID NO: 35851 - RNA, 20 nt, synthetic construct
  source 1..20: mol_type = other RNA
ggacaggttttgcaaatgag

SEQ ID NO: 35852 - RNA, 20 nt, synthetic construct
  source 1..20: mol_type = other RNA
ggagtctcatttgcaaaacc

SEQ ID NO: 35853 - RNA, 20 nt, synthetic construct
  source 1..20: mol_type = other RNA
ggcaccaacatataagaaac

SEQ ID NO: 35854 - RNA, 20 nt, synthetic construct
  source 1..20: mol_type = other RNA
ggtgcaagtttcttatatgt

SEQ ID NO: 35855 - RNA, 20 nt, synthetic construct
  source 1..20: mol_type = other RNA
ggtgccataagagtggacag

SEQ ID NO: 35856 - RNA, 20 nt, synthetic construct
  source 1..20: mol_type = other RNA
ggttttgcaaatgagactcc

SEQ ID NO: 35857 - RNA, 20 nt, synthetic construct
  source 1..20: mol_type = other RNA
gtccactcttatggcaccaa

SEQ ID NO: 35858 - RNA, 20 nt, synthetic construct
  source 1..20: mol_type = other RNA
gtctcatttgcaaaacctgt

SEQ ID NO: 35859 - RNA, 20 nt, synthetic construct
  source 1..20: mol_type = other RNA
gtgcaagtttcttatatgtt

SEQ ID NO: 35860 - RNA, 20 nt, synthetic construct
  source 1..20: mol_type = other RNA
gtgccataagagtggacagg

SEQ ID NO: 35861 - RNA, 20 nt, synthetic construct
  source 1..20: mol_type = other RNA
gtggacaggttttgcaaatg

SEQ ID NO: 35862 - RNA, 20 nt, synthetic construct
  source 1..20: mol_type = other RNA
gttacaattgctgccaatga

SEQ ID NO: 35863 - RNA, 20 nt, synthetic construct
  source 1..20: mol_type = other RNA
gttggtgccataagagtgga

SEQ ID NO: 35864 - RNA, 20 nt, synthetic construct
  source 1..20: mol_type = other RNA
gttgttacaattgctgccaa

SEQ ID NO: 35865 - RNA, 20 nt, synthetic construct
  source 1..20: mol_type = other RNA
gtttaaataatcattggcag

SEQ ID NO: 35866 - RNA, 20 nt, synthetic construct
  source 1..20: mol_type = other RNA
gtttctcttcctgtataaag

SEQ ID NO: 35867 - RNA, 20 nt, synthetic construct
  source 1..20: mol_type = other RNA
gtttcttatatgttggtgcc

SEQ ID NO: 35868 - RNA, 20 nt, synthetic construct
  source 1..20: mol_type = other RNA
gttttgcaaatgagactcca

SEQ ID NO: 35869 - RNA, 20 nt, synthetic construct
  source 1..20: mol_type = other RNA
taaataatcattggcagcaa

SEQ ID NO: 35870 - RNA, 20 nt, synthetic construct
  source 1..20: mol_type = other RNA
taagaaacttgcacctgatg

SEQ ID NO: 35871 - RNA, 20 nt, synthetic construct
  source 1..20: mol_type = other RNA
taagagtggacaggttttgc

SEQ ID NO: 35872 - RNA, 20 nt, synthetic construct
  source 1..20: mol_type = other RNA
tacaattgctgccaatgatt

SEQ ID NO: 35873 - RNA, 20 nt, synthetic construct
  source 1..20: mol_type = other RNA
tacaggaagagaaactggag

SEQ ID NO: 35874 - RNA, 20 nt, synthetic construct
  source 1..20: mol_type = other RNA
tacctgattattatatgcat

SEQ ID NO: 35875 - RNA, 20 nt, synthetic construct
  source 1..20: mol_type = other RNA
tataagaaacttgcacctga

SEQ ID NO: 35876 - RNA, 20 nt, synthetic construct
  source 1..20: mol_type = other RNA
tatacaggaagagaaactgg

SEQ ID NO: 35877 - RNA, 20 nt, synthetic construct
  source 1..20: mol_type = other RNA
tatatgcatcaggtgcaagt

SEQ ID NO: 35878 - RNA, 20 nt, synthetic construct
  source 1..20: mol_type = other RNA
tatatgttggtgccataaga

SEQ ID NO: 35879 - RNA, 20 nt, synthetic construct
  source 1..20: mol_type = other RNA
tatgcatcaggtgcaagttt

SEQ ID NO: 35880 - RNA, 20 nt, synthetic construct
  source 1..20: mol_type = other RNA
tatggcaccaacatataaga

SEQ ID NO: 35881 - RNA, 20 nt, synthetic construct
  source 1..20: mol_type = other RNA
tatgttggtgccataagagt

SEQ ID NO: 35882 - RNA, 20 nt, synthetic construct
  source 1..20: mol_type = other RNA
tattatatgcatcaggtgca

SEQ ID NO: 35883 - RNA, 20 nt, synthetic construct
  source 1..20: mol_type = other RNA
tattcactttatacaggaag

SEQ ID NO: 35884 - RNA, 20 nt, synthetic construct
  source 1..20: mol_type = other RNA
tcactttatacaggaagaga

SEQ ID NO: 35885 - RNA, 20 nt, synthetic construct
  source 1..20: mol_type = other RNA
tcaggtaagtttaaataatc

SEQ ID NO: 35886 - RNA, 20 nt, synthetic construct
  source 1..20: mol_type = other RNA
tcaggtgcaagtttcttata

SEQ ID NO: 35887 - RNA, 20 nt, synthetic construct
  source 1..20: mol_type = other RNA
tcatttgcaaaacctgtcca

SEQ ID NO: 35888 - RNA, 20 nt, synthetic construct
  source 1..20: mol_type = other RNA
tccactcttatggcaccaac

SEQ ID NO: 35889 - RNA, 20 nt, synthetic construct
  source 1..20: mol_type = other RNA
tccagtttctcttcctgtat

SEQ ID NO: 35890 - RNA, 20 nt, synthetic construct
  source 1..20: mol_type = other RNA
tcctgtataaagtgaataat

SEQ ID NO: 35891 - RNA, 20 nt, synthetic construct
  source 1..20: mol_type = other RNA
tctcatttgcaaaacctgtc

SEQ ID NO: 35892 - RNA, 20 nt, synthetic construct
  source 1..20: mol_type = other RNA
tctcttcctgtataaagtga

SEQ ID NO: 35893 - RNA, 20 nt, synthetic construct
  source 1..20: mol_type = other RNA
tcttatatgttggtgccata

SEQ ID NO: 35894 - RNA, 20 nt, synthetic construct
  source 1..20: mol_type = other RNA
tcttatggcaccaacatata

SEQ ID NO: 35895 - RNA, 20 nt, synthetic construct
  source 1..20: mol_type = other RNA
tcttcctgtataaagtgaat

SEQ ID NO: 35896 - RNA, 20 nt, synthetic construct
  source 1..20: mol_type = other RNA
tgagactccagtttctcttc

SEQ ID NO: 35897 - RNA, 20 nt, synthetic construct
  source 1..20: mol_type = other RNA
tgatgcatataataatcagg

SEQ ID NO: 35898 - RNA, 20 nt, synthetic construct
  source 1..20: mol_type = other RNA
tgattattatatgcatcagg

SEQ ID NO: 35899 - RNA, 20 nt, synthetic construct
  source 1..20: mol_type = other RNA
tgattatttaaacttacctg

SEQ ID NO: 35900 - RNA, 20 nt, synthetic construct
  source 1..20: mol_type = other RNA
tgcaaaacctgtccactctt

SEQ ID NO: 35901 - RNA, 20 nt, synthetic construct
  source 1..20: mol_type = other RNA
tgcaaatgagactccagttt

SEQ ID NO: 35902 - RNA, 20 nt, synthetic construct
  source 1..20: mol_type = other RNA
tgcaagtttcttatatgttg

SEQ ID NO: 35903 - RNA, 20 nt, synthetic construct
  source 1..20: mol_type = other RNA
tgcacctgatgcatataata

SEQ ID NO: 35904 - RNA, 20 nt, synthetic construct
  source 1..20: mol_type = other RNA
tgcatataataatcaggtaa

SEQ ID NO: 35905 - RNA, 20 nt, synthetic construct
  source 1..20: mol_type = other RNA
tgcatcaggtgcaagtttct

SEQ ID NO: 35906 - RNA, 20 nt, synthetic construct
  source 1..20: mol_type = other RNA
tgccaatgattatttaaact

SEQ ID NO: 35907 - RNA, 20 nt, synthetic construct
  source 1..20: mol_type = other RNA
tgccataagagtggacaggt

SEQ ID NO: 35908 - RNA, 20 nt, synthetic construct
  source 1..20: mol_type = other RNA
tgctgccaatgattatttaa

SEQ ID NO: 35909 - RNA, 20 nt, synthetic construct
  source 1..20: mol_type = other RNA
tggacaggttttgcaaatga

SEQ ID NO: 35910 - RNA, 20 nt, synthetic construct
  source 1..20: mol_type = other RNA
tggagtctcatttgcaaaac

SEQ ID NO: 35911 - RNA, 20 nt, synthetic construct
  source 1..20: mol_type = other RNA
tggcaccaacatataagaaa

SEQ ID NO: 35912 - RNA, 20 nt, synthetic construct
  source 1..20: mol_type = other RNA
tggtgccataagagtggaca

SEQ ID NO: 35913 - RNA, 20 nt, synthetic construct
  source 1..20: mol_type = other RNA
tgtccactcttatggcacca

SEQ ID NO: 35914 - RNA, 20 nt, synthetic construct
  source 1..20: mol_type = other RNA
tgttacaattgctgccaatg

SEQ ID NO: 35915 - RNA, 20 nt, synthetic construct
  source 1..20: mol_type = other RNA
tgttggtgccataagagtgg

SEQ ID NO: 35916 - RNA, 20 nt, synthetic construct
  source 1..20: mol_type = other RNA
ttaaataatcattggcagca

SEQ ID NO: 35917 - RNA, 20 nt, synthetic construct
  source 1..20: mol_type = other RNA
ttacaattgctgccaatgat

SEQ ID NO: 35918 - RNA, 20 nt, synthetic construct
  source 1..20: mol_type = other RNA
ttacctgattattatatgca

SEQ ID NO: 35919 - RNA, 20 nt, synthetic construct
  source 1..20: mol_type = other RNA
ttatacaggaagagaaactg

SEQ ID NO: 35920 - RNA, 20 nt, synthetic construct
  source 1..20: mol_type = other RNA
ttatatgcatcaggtgcaag

SEQ ID NO: 35921 - RNA, 20 nt, synthetic construct
  source 1..20: mol_type = other RNA
ttatatgttggtgccataag

SEQ ID NO: 35922 - RNA, 20 nt, synthetic construct
  source 1..20: mol_type = other RNA
ttatggcaccaacatataag

SEQ ID NO: 35923 - RNA, 20 nt, synthetic construct
  source 1..20: mol_type = other RNA
ttattatatgcatcaggtgc

SEQ ID NO: 35924 - RNA, 20 nt, synthetic construct
  source 1..20: mol_type = other RNA
ttattcactttatacaggaa

SEQ ID NO: 35925 - RNA, 20 nt, synthetic construct
  source 1..20: mol_type = other RNA
ttcactttatacaggaagag

SEQ ID NO: 35926 - RNA, 20 nt, synthetic construct
  source 1..20: mol_type = other RNA
ttcctgtataaagtgaataa

SEQ ID NO: 35927 - RNA, 20 nt, synthetic construct
  source 1..20: mol_type = other RNA
ttctcttcctgtataaagtg

SEQ ID NO: 35928 - RNA, 20 nt, synthetic construct
  source 1..20: mol_type = other RNA
ttcttatatgttggtgccat

SEQ ID NO: 35929 - RNA, 20 nt, synthetic construct
  source 1..20: mol_type = other RNA
ttgcaaaacctgtccactct

SEQ ID NO: 35930 - RNA, 20 nt, synthetic construct
  source 1..20: mol_type = other RNA
ttgcaaatgagactccagtt

SEQ ID NO: 35931 - RNA, 20 nt, synthetic construct
  source 1..20: mol_type = other RNA
ttgcacctgatgcatataat

SEQ ID NO: 35932 - RNA, 20 nt, synthetic construct
  source 1..20: mol_type = other RNA
ttgctgccaatgattattta

SEQ ID NO: 35933 - RNA, 20 nt, synthetic construct
  source 1..20: mol_type = other RNA
ttggtgccataagagtggac

SEQ ID NO: 35934 - RNA, 20 nt, synthetic construct
  source 1..20: mol_type = other RNA
ttgttacaattgctgccaat

SEQ ID NO: 35935 - RNA, 20 nt, synthetic construct
  source 1..20: mol_type = other RNA
tttaaataatcattggcagc

SEQ ID NO: 35936 - RNA, 20 nt, synthetic construct
  source 1..20: mol_type = other RNA
tttatacaggaagagaaact

SEQ ID NO: 35937 - RNA, 20 nt, synthetic construct
  source 1..20: mol_type = other RNA
tttctcttcctgtataaagt

SEQ ID NO: 35938 - RNA, 20 nt, synthetic construct
  source 1..20: mol_type = other RNA
tttcttatatgttggtgcca

SEQ ID NO: 35939 - RNA, 20 nt, synthetic construct
  source 1..20: mol_type = other RNA
tttgcaaaacctgtccactc

SEQ ID NO: 35940 - RNA, 20 nt, synthetic construct
  source 1..20: mol_type = other RNA
tttgcaaatgagactccagt

SEQ ID NO: 35941 - RNA, 20 nt, synthetic construct
  source 1..20: mol_type = other RNA
ttttgcaaatgagactccag

SEQ ID NO: 35942 - RNA, 21 nt, synthetic construct
  source 1..21: mol_type = other RNA
aaaacctgtccactcttatgg

SEQ ID NO: 35943 - RNA, 21 nt, synthetic construct
  source 1..21: mol_type = other RNA
aaacctgtccactcttatggc

SEQ ID NO: 35944 - RNA, 21 nt, synthetic construct
  source 1..21: mol_type = other RNA
aaactggagtctcatttgcaa

SEQ ID NO: 35945 - RNA, 21 nt, synthetic construct
  source 1..21: mol_type = other RNA
aaacttgcacctgatgcatat

SEQ ID NO: 35946 - RNA, 21 nt, synthetic construct
  source 1..21: mol_type = other RNA
aaataatcattggcagcaatt

SEQ ID NO: 35947 - RNA, 21 nt, synthetic construct
  source 1..21: mol_type = other RNA
aaatgagactccagtttctct

SEQ ID NO: 35948 - RNA, 21 nt, synthetic construct
  source 1..21: mol_type = other RNA
aacatataagaaacttgcacc

SEQ ID NO: 35949 - RNA, 21 nt, synthetic construct
  source 1..21: mol_type = other RNA
aacctgtccactcttatggca

SEQ ID NO: 35950 - RNA, 21 nt, synthetic construct
  source 1..21: mol_type = other RNA
aactggagtctcatttgcaaa

SEQ ID NO: 35951 - RNA, 21 nt, synthetic construct
  source 1..21: mol_type = other RNA
aacttgcacctgatgcatata

SEQ ID NO: 35952 - RNA, 21 nt, synthetic construct
  source 1..21: mol_type = other RNA
aagaaacttgcacctgatgca

SEQ ID NO: 35953 - RNA, 21 nt, synthetic construct
  source 1..21: mol_type = other RNA
aagagaaactggagtctcatt

SEQ ID NO: 35954 - RNA, 21 nt, synthetic construct
  source 1..21: mol_type = other RNA
aagagtggacaggttttgcaa

SEQ ID NO: 35955 - RNA, 21 nt, synthetic construct
  source 1..21: mol_type = other RNA
aagtttcttatatgttggtgc

SEQ ID NO: 35956 - RNA, 21 nt, synthetic construct
  source 1..21: mol_type = other RNA
aataatcattggcagcaattg

SEQ ID NO: 35957 - RNA, 21 nt, synthetic construct
  source 1..21: mol_type = other RNA
aatgagactccagtttctctt

SEQ ID NO: 35958 - RNA, 21 nt, synthetic construct
  source 1..21: mol_type = other RNA
aattgctgccaatgattattt

SEQ ID NO: 35959 - RNA, 21 nt, synthetic construct
  source 1..21: mol_type = other RNA
acaattgctgccaatgattat

SEQ ID NO: 35960 - RNA, 21 nt, synthetic construct
  source 1..21: mol_type = other RNA
acaggaagagaaactggagtc

SEQ ID NO: 35961 - RNA, 21 nt, synthetic construct
  source 1..21: mol_type = other RNA
acaggttttgcaaatgagact

SEQ ID NO: 35962 - RNA, 21 nt, synthetic construct
  source 1..21: mol_type = other RNA
acatataagaaacttgcacct

SEQ ID NO: 35963 - RNA, 21 nt, synthetic construct
  source 1..21: mol_type = other RNA
accaacatataagaaacttgc

SEQ ID NO: 35964 - RNA, 21 nt, synthetic construct
  source 1..21: mol_type = other RNA
acctgatgcatataataatca

SEQ ID NO: 35965 - RNA, 21 nt, synthetic construct
  source 1..21: mol_type = other RNA
acctgattattatatgcatca

SEQ ID NO: 35966 - RNA, 21 nt, synthetic construct
  source 1..21: mol_type = other RNA
acctgtccactcttatggcac

SEQ ID NO: 35967 - RNA, 21 nt, synthetic construct
  source 1..21: mol_type = other RNA
actccagtttctcttcctgta

SEQ ID NO: 35968 - RNA, 21 nt, synthetic construct
  source 1..21: mol_type = other RNA
actcttatggcaccaacatat

SEQ ID NO: 35969 - RNA, 21 nt, synthetic construct
  source 1..21: mol_type = other RNA
actggagtctcatttgcaaaa

SEQ ID NO: 35970 - RNA, 21 nt, synthetic construct
  source 1..21: mol_type = other RNA
acttacctgattattatatgc

SEQ ID NO: 35971 - RNA, 21 nt, synthetic construct
  source 1..21: mol_type = other RNA
acttgcacctgatgcatataa

SEQ ID NO: 35972 - RNA, 21 nt, synthetic construct
  source 1..21: mol_type = other RNA
actttatacaggaagagaaac

SEQ ID NO: 35973 - RNA, 21 nt, synthetic construct
  source 1..21: mol_type = other RNA
agaaactggagtctcatttgc

SEQ ID NO: 35974 - RNA, 21 nt, synthetic construct
  source 1..21: mol_type = other RNA
agaaacttgcacctgatgcat

SEQ ID NO: 35975 - RNA, 21 nt, synthetic construct
  source 1..21: mol_type = other RNA
agactccagtttctcttcctg

SEQ ID NO: 35976 - RNA, 21 nt, synthetic construct
  source 1..21: mol_type = other RNA
agagaaactggagtctcattt

SEQ ID NO: 35977 - RNA, 21 nt, synthetic construct
  source 1..21: mol_type = other RNA
agagtggacaggttttgcaaa

SEQ ID NO: 35978 - RNA, 21 nt, synthetic construct
  source 1..21: mol_type = other RNA
aggaagagaaactggagtctc

SEQ ID NO: 35979 - RNA, 21 nt, synthetic construct
  source 1..21: mol_type = other RNA
aggtgcaagtttcttatatgt

SEQ ID NO: 35980 - RNA, 21 nt, synthetic construct
  source 1..21: mol_type = other RNA
aggttttgcaaatgagactcc

SEQ ID NO: 35981 - RNA, 21 nt, synthetic construct
  source 1..21: mol_type = other RNA
agtctcatttgcaaaacctgt

SEQ ID NO: 35982 - RNA, 21 nt, synthetic construct
  source 1..21: mol_type = other RNA
agtggacaggttttgcaaatg

SEQ ID NO: 35983 - RNA, 21 nt, synthetic construct
  source 1..21: mol_type = other RNA
agttgttacaattgctgccaa

SEQ ID NO: 35984 - RNA, 21 nt, synthetic construct
  source 1..21: mol_type = other RNA
agtttaaataatcattggcag

SEQ ID NO: 35985 - RNA, 21 nt, synthetic construct
  source 1..21: mol_type = other RNA
agtttctcttcctgtataaag

SEQ ID NO: 35986 - RNA, 21 nt, synthetic construct
  source 1..21: mol_type = other RNA
agtttcttatatgttggtgcc

SEQ ID NO: 35987 - RNA, 21 nt, synthetic construct
  source 1..21: mol_type = other RNA
ataagaaacttgcacctgatg

SEQ ID NO: 35988 - RNA, 21 nt, synthetic construct
  source 1..21: mol_type = other RNA
ataagagtggacaggttttgc

SEQ ID NO: 35989 - RNA, 21 nt, synthetic construct
  source 1..21: mol_type = other RNA
atacaggaagagaaactggag

SEQ ID NO: 35990 - RNA, 21 nt, synthetic construct
  source 1..21: mol_type = other RNA
atataagaaacttgcacctga

SEQ ID NO: 35991 - RNA, 21 nt, synthetic construct
  source 1..21: mol_type = other RNA
atatgcatcaggtgcaagttt

SEQ ID NO: 35992 - RNA, 21 nt, synthetic construct
  source 1..21: mol_type = other RNA
atatgttggtgccataagagt

SEQ ID NO: 35993 - RNA, 21 nt, synthetic construct
  source 1..21: mol_type = other RNA
atcaggtgcaagtttcttata

SEQ ID NO: 35994 - RNA, 21 nt, synthetic construct
  source 1..21: mol_type = other RNA
atgagactccagtttctcttc

SEQ ID NO: 35995 - RNA, 21 nt, synthetic construct
  source 1..21: mol_type = other RNA
atgcatcaggtgcaagtttct

SEQ ID NO: 35996 - RNA, 21 nt, synthetic construct
  source 1..21: mol_type = other RNA
atggcaccaacatataagaaa

SEQ ID NO: 35997 - RNA, 21 nt, synthetic construct
  source 1..21: mol_type = other RNA
atgttggtgccataagagtgg

SEQ ID NO: 35998 - RNA, 21 nt, synthetic construct
  source 1..21: mol_type = other RNA
attatatgcatcaggtgcaag

SEQ ID NO: 35999 - RNA, 21 nt, synthetic construct
  source 1..21: mol_type = other RNA
attattatatgcatcaggtgc

SEQ ID NO: 36000 - RNA, 21 nt, synthetic construct
  source 1..21: mol_type = other RNA
attcactttatacaggaagag

SEQ ID NO: 36001 - RNA, 21 nt, synthetic construct
  source 1..21: mol_type = other RNA
attgctgccaatgattattta

SEQ ID NO: 36002 - RNA, 21 nt, synthetic construct
  source 1..21: mol_type = other RNA
atttgcaaaacctgtccactc

SEQ ID NO: 36003 - RNA, 21 nt, synthetic construct
  source 1..21: mol_type = other RNA
caaaacctgtccactcttatg

SEQ ID NO: 36004 - RNA, 21 nt, synthetic construct
  source 1..21: mol_type = other RNA
caaatgagactccagtttctc

SEQ ID NO: 36005 - RNA, 21 nt, synthetic construct
  source 1..21: mol_type = other RNA
caacatataagaaacttgcac

SEQ ID NO: 36006 - RNA, 21 nt, synthetic construct
  source 1..21: mol_type = other RNA
caagtttcttatatgttggtg

SEQ ID NO: 36007 - RNA, 21 nt, synthetic construct
  source 1..21: mol_type = other RNA
caattgctgccaatgattatt

SEQ ID NO: 36008 - RNA, 21 nt, synthetic construct
  source 1..21: mol_type = other RNA
caccaacatataagaaacttg

SEQ ID NO: 36009 - RNA, 21 nt, synthetic construct
  source 1..21: mol_type = other RNA
cacctgatgcatataataatc

SEQ ID NO: 36010 - RNA, 21 nt, synthetic construct
  source 1..21: mol_type = other RNA
cactcttatggcaccaacata

SEQ ID NO: 36011 - RNA, 21 nt, synthetic construct
  source 1..21: mol_type = other RNA
cactttatacaggaagagaaa

SEQ ID NO: 36012 - RNA, 21 nt, synthetic construct
  source 1..21: mol_type = other RNA
caggaagagaaactggagtct

SEQ ID NO: 36013 - RNA, 21 nt, synthetic construct
  source 1..21: mol_type = other RNA
caggtgcaagtttcttatatg

SEQ ID NO: 36014 - RNA, 21 nt, synthetic construct
  source 1..21: mol_type = other RNA
caggttttgcaaatgagactc

SEQ ID NO: 36015 - RNA, 21 nt, synthetic construct
  source 1..21: mol_type = other RNA
cagtttctcttcctgtataaa

SEQ ID NO: 36016 - RNA, 21 nt, synthetic construct
  source 1..21: mol_type = other RNA
cataagagtggacaggttttg

SEQ ID NO: 36017 - RNA, 21 nt, synthetic construct
  source 1..21: mol_type = other RNA
catataagaaacttgcacctg

SEQ ID NO: 36018 - RNA, 21 nt, synthetic construct
  source 1..21: mol_type = other RNA
catcaggtgcaagtttcttat

SEQ ID NO: 36019 - RNA, 21 nt, synthetic construct
  source 1..21: mol_type = other RNA
catttgcaaaacctgtccact

SEQ ID NO: 36020 - RNA, 21 nt, synthetic construct
  source 1..21: mol_type = other RNA
ccaacatataagaaacttgca

SEQ ID NO: 36021 - RNA, 21 nt, synthetic construct
  source 1..21: mol_type = other RNA
ccactcttatggcaccaacat

SEQ ID NO: 36022 - RNA, 21 nt, synthetic construct
  source 1..21: mol_type = other RNA
ccagtttctcttcctgtataa

SEQ ID NO: 36023 - RNA, 21 nt, synthetic construct
  source 1..21: mol_type = other RNA
ccataagagtggacaggtttt

SEQ ID NO: 36024 - RNA, 21 nt, synthetic construct
  source 1..21: mol_type = other RNA
cctgatgcatataataatcag

SEQ ID NO: 36025 - RNA, 21 nt, synthetic construct
  source 1..21: mol_type = other RNA
cctgattattatatgcatcag

SEQ ID NO: 36026 - RNA, 21 nt, synthetic construct
  source 1..21: mol_type = other RNA
cctgtataaagtgaataattc

SEQ ID NO: 36027 - RNA, 21 nt, synthetic construct
  source 1..21: mol_type = other RNA
cctgtccactcttatggcacc

SEQ ID NO: 36028 - RNA, 21 nt, synthetic construct
  source 1..21: mol_type = other RNA
ctcatttgcaaaacctgtcca

SEQ ID NO: 36029 - RNA, 21 nt, synthetic construct
  source 1..21: mol_type = other RNA
ctccagtttctcttcctgtat

SEQ ID NO: 36030 - RNA, 21 nt, synthetic construct
  source 1..21: mol_type = other RNA
ctcttatggcaccaacatata

SEQ ID NO: 36031 - RNA, 21 nt, synthetic construct
  source 1..21: mol_type = other RNA
ctcttcctgtataaagtgaat

SEQ ID NO: 36032 - RNA, 21 nt, synthetic construct
  source 1..21: mol_type = other RNA
ctgatgcatataataatcagg

SEQ ID NO: 36033 - RNA, 21 nt, synthetic construct
  source 1..21: mol_type = other RNA
ctgattattatatgcatcagg

SEQ ID NO: 36034 - RNA, 21 nt, synthetic construct
  source 1..21: mol_type = other RNA
ctgccaatgattatttaaact

SEQ ID NO: 36035 - RNA, 21 nt, synthetic construct
  source 1..21: mol_type = other RNA
ctggagtctcatttgcaaaac

SEQ ID NO: 36036 - RNA, 21 nt, synthetic construct
  source 1..21: mol_type = other RNA
ctgtccactcttatggcacca

SEQ ID NO: 36037 - RNA, 21 nt, synthetic construct
  source 1..21: mol_type = other RNA
cttacctgattattatatgca

SEQ ID NO: 36038 - RNA, 21 nt, synthetic construct
  source 1..21: mol_type = other RNA
cttatatgttggtgccataag

SEQ ID NO: 36039 - RNA, 21 nt, synthetic construct
  source 1..21: mol_type = other RNA
cttatggcaccaacatataag

SEQ ID NO: 36040 - RNA, 21 nt, synthetic construct
  source 1..21: mol_type = other RNA
cttcctgtataaagtgaataa

SEQ ID NO: 36041 - RNA, 21 nt, synthetic construct
  source 1..21: mol_type = other RNA
cttgcacctgatgcatataat

SEQ ID NO: 36042 - RNA, 21 nt, synthetic construct
  source 1..21: mol_type = other RNA
ctttatacaggaagagaaact

SEQ ID NO: 36043 - RNA, 21 nt, synthetic construct
  source 1..21: mol_type = other RNA
gaaactggagtctcatttgca

SEQ ID NO: 36044 - RNA, 21 nt, synthetic construct
  source 1..21: mol_type = other RNA
gaaacttgcacctgatgcata

SEQ ID NO: 36045 - RNA, 21 nt, synthetic construct
  source 1..21: mol_type = other RNA
gaagagaaactggagtctcat

SEQ ID NO: 36046 - RNA, 21 nt, synthetic construct
  source 1..21: mol_type = other RNA
gaattattcactttatacagg

SEQ ID NO: 36047 - RNA, 21 nt, synthetic construct
  source 1..21: mol_type = other RNA
gacaggttttgcaaatgagac

SEQ ID NO: 36048 - RNA, 21 nt, synthetic construct
  source 1..21: mol_type = other RNA
gactccagtttctcttcctgt

SEQ ID NO: 36049 - RNA, 21 nt, synthetic construct
  source 1..21: mol_type = other RNA
gagaaactggagtctcatttg

SEQ ID NO: 36050 - RNA, 21 nt, synthetic construct
  source 1..21: mol_type = other RNA
gagactccagtttctcttcct

SEQ ID NO: 36051 - RNA, 21 nt, synthetic construct
  source 1..21: mol_type = other RNA
gagtctcatttgcaaaacctg

SEQ ID NO: 36052 - RNA, 21 nt, synthetic construct
  source 1..21: mol_type = other RNA
gagtggacaggttttgcaaat

SEQ ID NO: 36053 - RNA, 21 nt, synthetic construct
  source 1..21: mol_type = other RNA
gatgcatataataatcaggta

SEQ ID NO: 36054 - RNA, 21 nt, synthetic construct
  source 1..21: mol_type = other RNA
gattattatatgcatcaggtg

SEQ ID NO: 36055 - RNA, 21 nt, synthetic construct
  source 1..21: mol_type = other RNA
gcaaaacctgtccactcttat

SEQ ID NO: 36056 - RNA, 21 nt, synthetic construct
  source 1..21: mol_type = other RNA
gcaaatgagactccagtttct

SEQ ID NO: 36057 - RNA, 21 nt, synthetic construct
  source 1..21: mol_type = other RNA
gcaagtttcttatatgttggt

SEQ ID NO: 36058 - RNA, 21 nt, synthetic construct
  source 1..21: mol_type = other RNA
gcaccaacatataagaaactt

SEQ ID NO: 36059 - RNA, 21 nt, synthetic construct
  source 1..21: mol_type = other RNA
gcacctgatgcatataataat

SEQ ID NO: 36060 - RNA, 21 nt, synthetic construct
  source 1..21: mol_type = other RNA
gcatataataatcaggtaagt

SEQ ID NO: 36061 - RNA, 21 nt, synthetic construct
  source 1..21: mol_type = other RNA
gcatcaggtgcaagtttctta

SEQ ID NO: 36062 - RNA, 21 nt, synthetic construct
  source 1..21: mol_type = other RNA
gccataagagtggacaggttt

SEQ ID NO: 36063 - RNA, 21 nt, synthetic construct
  source 1..21: mol_type = other RNA
gctgccaatgattatttaaac

SEQ ID NO: 36064 - RNA, 21 nt, synthetic construct
  source 1..21: mol_type = other RNA
ggaagagaaactggagtctca

SEQ ID NO: 36065 - RNA, 21 nt, synthetic construct
  source 1..21: mol_type = other RNA
ggacaggttttgcaaatgaga

SEQ ID NO: 36066 - RNA, 21 nt, synthetic construct
  source 1..21: mol_type = other RNA
ggagtctcatttgcaaaacct

SEQ ID NO: 36067 - RNA, 21 nt, synthetic construct
  source 1..21: mol_type = other RNA
ggcaccaacatataagaaact

SEQ ID NO: 36068 - RNA, 21 nt, synthetic construct
  source 1..21: mol_type = other RNA
ggtgcaagtttcttatatgtt

SEQ ID NO: 36069 - RNA, 21 nt, synthetic construct
  source 1..21: mol_type = other RNA
ggtgccataagagtggacagg

SEQ ID NO: 36070 - RNA, 21 nt, synthetic construct
  source 1..21: mol_type = other RNA
ggttttgcaaatgagactcca

SEQ ID NO: 36071 - RNA, 21 nt, synthetic construct
  source 1..21: mol_type = other RNA
gtccactcttatggcaccaac

SEQ ID NO: 36072 - RNA, 21 nt, synthetic construct
  source 1..21: mol_type = other RNA
gtctcatttgcaaaacctgtc

SEQ ID NO: 36073 - RNA, 21 nt, synthetic construct
  source 1..21: mol_type = other RNA
gtgcaagtttcttatatgttg

SEQ ID NO: 36074 - RNA, 21 nt, synthetic construct
  source 1..21: mol_type = other RNA
gtgccataagagtggacaggt

SEQ ID NO: 36075 - RNA, 21 nt, synthetic construct
  source 1..21: mol_type = other RNA
gtggacaggttttgcaaatga

SEQ ID NO: 36076 - RNA, 21 nt, synthetic construct
  source 1..21: mol_type = other RNA
gttacaattgctgccaatgat

SEQ ID NO: 36077 - RNA, 21 nt, synthetic construct
  source 1..21: mol_type = other RNA
gttggtgccataagagtggac

SEQ ID NO: 36078 - RNA, 21 nt, synthetic construct
  source 1..21: mol_type = other RNA
gttgttacaattgctgccaat

SEQ ID NO: 36079 - RNA, 21 nt, synthetic construct
  source 1..21: mol_type = other RNA
gtttaaataatcattggcagc

SEQ ID NO: 36080 - RNA, 21 nt, synthetic construct
  source 1..21: mol_type = other RNA
gtttctcttcctgtataaagt

SEQ ID NO: 36081 - RNA, 21 nt, synthetic construct
  source 1..21: mol_type = other RNA
gtttcttatatgttggtgcca

SEQ ID NO: 36082 - RNA, 21 nt, synthetic construct
  source 1..21: mol_type = other RNA
gttttgcaaatgagactccag

SEQ ID NO: 36083 - RNA, 21 nt, synthetic construct
  source 1..21: mol_type = other RNA
taaataatcattggcagcaat

SEQ ID NO: 36084 - RNA, 21 nt, synthetic construct
  source 1..21: mol_type = other RNA
taagaaacttgcacctgatgc

SEQ ID NO: 36085 - RNA, 21 nt, synthetic construct
  source 1..21: mol_type = other RNA
taagagtggacaggttttgca

SEQ ID NO: 36086 - RNA, 21 nt, synthetic construct
  source 1..21: mol_type = other RNA
tacaattgctgccaatgatta

SEQ ID NO: 36087 - RNA, 21 nt, synthetic construct
  source 1..21: mol_type = other RNA
tacaggaagagaaactggagt

SEQ ID NO: 36088 - RNA, 21 nt, synthetic construct
  source 1..21: mol_type = other RNA
tacctgattattatatgcatc

SEQ ID NO: 36089 - RNA, 21 nt, synthetic construct
  source 1..21: mol_type = other RNA
tataagaaacttgcacctgat

SEQ ID NO: 36090 - RNA, 21 nt, synthetic construct
  source 1..21: mol_type = other RNA
tatacaggaagagaaactgga

SEQ ID NO: 36091 - RNA, 21 nt, synthetic construct
  source 1..21: mol_type = other RNA
tatatgcatcaggtgcaagtt

SEQ ID NO: 36092 - RNA, 21 nt, synthetic construct
  source 1..21: mol_type = other RNA
tatatgttggtgccataagag

SEQ ID NO: 36093 - RNA, 21 nt, synthetic construct
  source 1..21: mol_type = other RNA
tatgcatcaggtgcaagtttc

SEQ ID NO: 36094 - RNA, 21 nt, synthetic construct
  source 1..21: mol_type = other RNA
tatggcaccaacatataagaa

SEQ ID NO: 36095 - RNA, 21 nt, synthetic construct
  source 1..21: mol_type = other RNA
tatgttggtgccataagagtg

SEQ ID NO: 36096 - RNA, 21 nt, synthetic construct
  source 1..21: mol_type = other RNA
tattatatgcatcaggtgcaa

SEQ ID NO: 36097 - RNA, 21 nt, synthetic construct
  source 1..21: mol_type = other RNA
tattcactttatacaggaaga

SEQ ID NO: 36098 - RNA, 21 nt, synthetic construct
  source 1..21: mol_type = other RNA
tcactttatacaggaagagaa

SEQ ID NO: 36099 - RNA, 21 nt, synthetic construct
  source 1..21: mol_type = other RNA
tcaggtgcaagtttcttatat

SEQ ID NO: 36100 - RNA, 21 nt, synthetic construct
  source 1..21: mol_type = other RNA
tcatttgcaaaacctgtccac

SEQ ID NO: 36101 - RNA, 21 nt, synthetic construct
  source 1..21: mol_type = other RNA
tccactcttatggcaccaaca

SEQ ID NO: 36102 - RNA, 21 nt, synthetic construct
  source 1..21: mol_type = other RNA
tccagtttctcttcctgtata

SEQ ID NO: 36103 - RNA, 21 nt, synthetic construct
  source 1..21: mol_type = other RNA
tctcatttgcaaaacctgtcc

SEQ ID NO: 36104 - RNA, 21 nt, synthetic construct
  source 1..21: mol_type = other RNA
tctcttcctgtataaagtgaa

SEQ ID NO: 36105 - RNA, 21 nt, synthetic construct
  source 1..21: mol_type = other RNA
tcttatatgttggtgccataa

SEQ ID NO: 36106 - RNA, 21 nt, synthetic construct
  source 1..21: mol_type = other RNA
tcttatggcaccaacatataa

SEQ ID NO: 36107 - RNA, 21 nt, synthetic construct
  source 1..21: mol_type = other RNA
tcttcctgtataaagtgaata

SEQ ID NO: 36108 - RNA, 21 nt, synthetic construct
  source 1..21: mol_type = other RNA
tgagactccagtttctcttcc

SEQ ID NO: 36109 - RNA, 21 nt, synthetic construct
  source 1..21: mol_type = other RNA
tgatgcatataataatcaggt

SEQ ID NO: 36110 - RNA, 21 nt, synthetic construct
  source 1..21: mol_type = other RNA
tgattattatatgcatcaggt

SEQ ID NO: 36111 - RNA, 21 nt, synthetic construct
  source 1..21: mol_type = other RNA
tgcaaaacctgtccactctta

SEQ ID NO: 36112 - RNA, 21 nt, synthetic construct
  source 1..21: mol_type = other RNA
tgcaaatgagactccagtttc

SEQ ID NO: 36113 - RNA, 21 nt, synthetic construct
  source 1..21: mol_type = other RNA
tgcaagtttcttatatgttgg

SEQ ID NO: 36114 - RNA, 21 nt, synthetic construct
  source 1..21: mol_type = other RNA
tgcacctgatgcatataataa

SEQ ID NO: 36115 - RNA, 21 nt, synthetic construct
  source 1..21: mol_type = other RNA
tgcatataataatcaggtaag

SEQ ID NO: 36116 - RNA, 21 nt, synthetic construct
  source 1..21: mol_type = other RNA
tgcatcaggtgcaagtttctt

SEQ ID NO: 36117 - RNA, 21 nt, synthetic construct
  source 1..21: mol_type = other RNA
tgccataagagtggacaggtt

SEQ ID NO: 36118 - RNA, 21 nt, synthetic construct
  source 1..21: mol_type = other RNA
tgctgccaatgattatttaaa

SEQ ID NO: 36119 - RNA, 21 nt, synthetic construct
  source 1..21: mol_type = other RNA
tggacaggttttgcaaatgag

SEQ ID NO: 36120 - RNA, 21 nt, synthetic construct
  source 1..21: mol_type = other RNA
tggagtctcatttgcaaaacc

SEQ ID NO: 36121 - RNA, 21 nt, synthetic construct
  source 1..21: mol_type = other RNA
tggcaccaacatataagaaac

SEQ ID NO: 36122 - RNA, 21 nt, synthetic construct
  source 1..21: mol_type = other RNA
tggtgccataagagtggacag

SEQ ID NO: 36123 - RNA, 21 nt, synthetic construct
  source 1..21: mol_type = other RNA
tgtccactcttatggcaccaa

SEQ ID NO: 36124 - RNA, 21 nt, synthetic construct
  source 1..21: mol_type = other RNA
tgttacaattgctgccaatga

SEQ ID NO: 36125 - RNA, 21 nt, synthetic construct
  source 1..21: mol_type = other RNA
tgttggtgccataagagtgga

SEQ ID NO: 36126 - RNA, 21 nt, synthetic construct
  source 1..21: mol_type = other RNA
ttaaataatcattggcagcaa

SEQ ID NO: 36127 - RNA, 21 nt, synthetic construct
  source 1..21: mol_type = other RNA
ttacaattgctgccaatgatt

SEQ ID NO: 36128 - RNA, 21 nt, synthetic construct
  source 1..21: mol_type = other RNA
ttatacaggaagagaaactgg

SEQ ID NO: 36129 - RNA, 21 nt, synthetic construct
  source 1..21: mol_type = other RNA
ttatatgcatcaggtgcaagt

SEQ ID NO: 36130 - RNA, 21 nt, synthetic construct
  source 1..21: mol_type = other RNA
ttatatgttggtgccataaga

SEQ ID NO: 36131 - RNA, 21 nt, synthetic construct
  source 1..21: mol_type = other RNA
ttatggcaccaacatataaga

SEQ ID NO: 36132 - RNA, 21 nt, synthetic construct
  source 1..21: mol_type = other RNA
ttattatatgcatcaggtgca

SEQ ID NO: 36133 - RNA, 21 nt, synthetic construct
  source 1..21: mol_type = other RNA
ttattcactttatacaggaag

SEQ ID NO: 36134 - RNA, 21 nt, synthetic construct
  source 1..21: mol_type = other RNA
ttcactttatacaggaagaga

SEQ ID NO: 36135 - RNA, 21 nt, synthetic construct
  source 1..21: mol_type = other RNA
ttctcttcctgtataaagtga

SEQ ID NO: 36136 - RNA, 21 nt, synthetic construct
  source 1..21: mol_type = other RNA
ttcttatatgttggtgccata

SEQ ID NO: 36137 - RNA, 21 nt, synthetic construct
  source 1..21: mol_type = other RNA
ttgcaaaacctgtccactctt

SEQ ID NO: 36138 - RNA, 21 nt, synthetic construct
  source 1..21: mol_type = other RNA
ttgcaaatgagactccagttt

SEQ ID NO: 36139 - RNA, 21 nt, synthetic construct
  source 1..21: mol_type = other RNA
ttgcacctgatgcatataata

SEQ ID NO: 36140 - RNA, 21 nt, synthetic construct
  source 1..21: mol_type = other RNA
ttgctgccaatgattatttaa

SEQ ID NO: 36141 - RNA, 21 nt, synthetic construct
  source 1..21: mol_type = other RNA
ttggtgccataagagtggaca

SEQ ID NO: 36142 - RNA, 21 nt, synthetic construct
  source 1..21: mol_type = other RNA
ttgttacaattgctgccaatg

SEQ ID NO: 36143 - RNA, 21 nt, synthetic construct
  source 1..21: mol_type = other RNA
tttaaataatcattggcagca

SEQ ID NO: 36144 - RNA, 21 nt, synthetic construct
  source 1..21: mol_type = other RNA
tttatacaggaagagaaactg

SEQ ID NO: 36145 - RNA, 21 nt, synthetic construct
  source 1..21: mol_type = other RNA
tttctcttcctgtataaagtg

SEQ ID NO: 36146 - RNA, 21 nt, synthetic construct
  source 1..21: mol_type = other RNA
tttcttatatgttggtgccat

SEQ ID NO: 36147 - RNA, 21 nt, synthetic construct
  source 1..21: mol_type = other RNA
tttgcaaaacctgtccactct

SEQ ID NO: 36148 - RNA, 21 nt, synthetic construct
  source 1..21: mol_type = other RNA
tttgcaaatgagactccagtt

SEQ ID NO: 36149 - RNA, 21 nt, synthetic construct
  source 1..21: mol_type = other RNA
ttttgcaaatgagactccagt

SEQ ID NO: 36150 - RNA, 22 nt, synthetic construct
  source 1..22: mol_type = other RNA
aaaacctgtccactcttatggc

SEQ ID NO: 36151 - RNA, 22 nt, synthetic construct
  source 1..22: mol_type = other RNA
aaacctgtccactcttatggca

SEQ ID NO: 36152 - RNA, 22 nt, synthetic construct
  source 1..22: mol_type = other RNA
aaactggagtctcatttgcaaa

SEQ ID NO: 36153 - RNA, 22 nt, synthetic construct
  source 1..22: mol_type = other RNA
aaacttgcacctgatgcatata

SEQ ID NO: 36154 - RNA, 22 nt, synthetic construct
  source 1..22: mol_type = other RNA
aaataatcattggcagcaattg

SEQ ID NO: 36155 - RNA, 22 nt, synthetic construct
  source 1..22: mol_type = other RNA
aaatgagactccagtttctctt

SEQ ID NO: 36156 - RNA, 22 nt, synthetic construct
  source 1..22: mol_type = other RNA
aacatataagaaacttgcacct

SEQ ID NO: 36157 - RNA, 22 nt, synthetic construct
  source 1..22: mol_type = other RNA
aacctgtccactcttatggcac

SEQ ID NO: 36158 - RNA, 22 nt, synthetic construct
  source 1..22: mol_type = other RNA
aactggagtctcatttgcaaaa

SEQ ID NO: 36159 - RNA, 22 nt, synthetic construct
  source 1..22: mol_type = other RNA
aacttacctgattattatatgc

SEQ ID NO: 36160 - RNA, 22 nt, synthetic construct
  source 1..22: mol_type = other RNA
aacttgcacctgatgcatataa

SEQ ID NO: 36161 - RNA, 22 nt, synthetic construct
  source 1..22: mol_type = other RNA
aagaaacttgcacctgatgcat

SEQ ID NO: 36162 - RNA, 22 nt, synthetic construct
  source 1..22: mol_type = other RNA
aagagaaactggagtctcattt

SEQ ID NO: 36163 - RNA, 22 nt, synthetic construct
  source 1..22: mol_type = other RNA
aagagtggacaggttttgcaaa

SEQ ID NO: 36164 - RNA, 22 nt, synthetic construct
  source 1..22: mol_type = other RNA
aagtttaaataatcattggcag

SEQ ID NO: 36165 - RNA, 22 nt, synthetic construct
  source 1..22: mol_type = other RNA
aagtttcttatatgttggtgcc

SEQ ID NO: 36166 - RNA, 22 nt, synthetic construct
  source 1..22: mol_type = other RNA
aatgagactccagtttctcttc

SEQ ID NO: 36167 - RNA, 22 nt, synthetic construct
  source 1..22: mol_type = other RNA
aattgctgccaatgattattta

SEQ ID NO: 36168 - RNA, 22 nt, synthetic construct
  source 1..22: mol_type = other RNA
acaattgctgccaatgattatt

SEQ ID NO: 36169 - RNA, 22 nt, synthetic construct
  source 1..22: mol_type = other RNA
acaggaagagaaactggagtct

SEQ ID NO: 36170 - RNA, 22 nt, synthetic construct
  source 1..22: mol_type = other RNA
acaggttttgcaaatgagactc

SEQ ID NO: 36171 - RNA, 22 nt, synthetic construct
  source 1..22: mol_type = other RNA
acatataagaaacttgcacctg

SEQ ID NO: 36172 - RNA, 22 nt, synthetic construct
  source 1..22: mol_type = other RNA
accaacatataagaaacttgca

SEQ ID NO: 36173 - RNA, 22 nt, synthetic construct
  source 1..22: mol_type = other RNA
acctgatgcatataataatcag

SEQ ID NO: 36174 - RNA, 22 nt, synthetic construct
  source 1..22: mol_type = other RNA
acctgattattatatgcatcag

SEQ ID NO: 36175 - RNA, 22 nt, synthetic construct
  source 1..22: mol_type = other RNA
acctgtccactcttatggcacc

SEQ ID NO: 36176 - RNA, 22 nt, synthetic construct
  source 1..22: mol_type = other RNA
actccagtttctcttcctgtat

SEQ ID NO: 36177 - RNA, 22 nt, synthetic construct
  source 1..22: mol_type = other RNA
actcttatggcaccaacatata

SEQ ID NO: 36178 - RNA, 22 nt, synthetic construct
  source 1..22: mol_type = other RNA
actggagtctcatttgcaaaac

SEQ ID NO: 36179 - RNA, 22 nt, synthetic construct
  source 1..22: mol_type = other RNA
acttacctgattattatatgca

SEQ ID NO: 36180 - RNA, 22 nt, synthetic construct
  source 1..22: mol_type = other RNA
acttgcacctgatgcatataat

SEQ ID NO: 36181 - RNA, 22 nt, synthetic construct
  source 1..22: mol_type = other RNA
actttatacaggaagagaaact

SEQ ID NO: 36182 - RNA, 22 nt, synthetic construct
  source 1..22: mol_type = other RNA
agaaactggagtctcatttgca

SEQ ID NO: 36183 - RNA, 22 nt, synthetic construct
  source 1..22: mol_type = other RNA
agaaacttgcacctgatgcata

SEQ ID NO: 36184 - RNA, 22 nt, synthetic construct
  source 1..22: mol_type = other RNA
agaattattcactttatacagg

SEQ ID NO: 36185 - RNA, 22 nt, synthetic construct
  source 1..22: mol_type = other RNA
agactccagtttctcttcctgt

SEQ ID NO: 36186 - RNA, 22 nt, synthetic construct
  source 1..22: mol_type = other RNA
agagaaactggagtctcatttg

SEQ ID NO: 36187 - RNA, 22 nt, synthetic construct
  source 1..22: mol_type = other RNA
agagtggacaggttttgcaaat

SEQ ID NO: 36188 - RNA, 22 nt, synthetic construct
  source 1..22: mol_type = other RNA
aggaagagaaactggagtctca

SEQ ID NO: 36189 - RNA, 22 nt, synthetic construct
  source 1..22: mol_type = other RNA
aggtgcaagtttcttatatgtt

SEQ ID NO: 36190 - RNA, 22 nt, synthetic construct
  source 1..22: mol_type = other RNA
aggttttgcaaatgagactcca

SEQ ID NO: 36191 - RNA, 22 nt, synthetic construct
  source 1..22: mol_type = other RNA
agtctcatttgcaaaacctgtc

SEQ ID NO: 36192 - RNA, 22 nt, synthetic construct
  source 1..22: mol_type = other RNA
agtggacaggttttgcaaatga

SEQ ID NO: 36193 - RNA, 22 nt, synthetic construct
  source 1..22: mol_type = other RNA
agttgttacaattgctgccaat

SEQ ID NO: 36194 - RNA, 22 nt, synthetic construct
  source 1..22: mol_type = other RNA
agtttaaataatcattggcagc

SEQ ID NO: 36195 - RNA, 22 nt, synthetic construct
  source 1..22: mol_type = other RNA
agtttctcttcctgtataaagt

SEQ ID NO: 36196 - RNA, 22 nt, synthetic construct
  source 1..22: mol_type = other RNA
agtttcttatatgttggtgcca

SEQ ID NO: 36197 - RNA, 22 nt, synthetic construct
  source 1..22: mol_type = other RNA
ataagaaacttgcacctgatgc

SEQ ID NO: 36198 - RNA, 22 nt, synthetic construct
  source 1..22: mol_type = other RNA
ataagagtggacaggttttgca

SEQ ID NO: 36199 - RNA, 22 nt, synthetic construct
  source 1..22: mol_type = other RNA
atacaggaagagaaactggagt

SEQ ID NO: 36200 - RNA, 22 nt, synthetic construct
  source 1..22: mol_type = other RNA
atataagaaacttgcacctgat

SEQ ID NO: 36201 - RNA, 22 nt, synthetic construct
  source 1..22: mol_type = other RNA
atatgcatcaggtgcaagtttc

SEQ ID NO: 36202 - RNA, 22 nt, synthetic construct
  source 1..22: mol_type = other RNA
atatgttggtgccataagagtg

SEQ ID NO: 36203 - RNA, 22 nt, synthetic construct
  source 1..22: mol_type = other RNA
atcaggtgcaagtttcttatat

SEQ ID NO: 36204 - RNA, 22 nt, synthetic construct
  source 1..22: mol_type = other RNA
atgagactccagtttctcttcc

SEQ ID NO: 36205 - RNA, 22 nt, synthetic construct
  source 1..22: mol_type = other RNA
atgcatataataatcaggtaag

SEQ ID NO: 36206 - RNA, 22 nt, synthetic construct
  source 1..22: mol_type = other RNA
atgcatcaggtgcaagtttctt

SEQ ID NO: 36207 - RNA, 22 nt, synthetic construct
  source 1..22: mol_type = other RNA
atggcaccaacatataagaaac

SEQ ID NO: 36208 - RNA, 22 nt, synthetic construct
  source 1..22: mol_type = other RNA
atgttggtgccataagagtgga

SEQ ID NO: 36209 - RNA, 22 nt, synthetic construct
  source 1..22: mol_type = other RNA
attatatgcatcaggtgcaagt

SEQ ID NO: 36210 - RNA, 22 nt, synthetic construct
  source 1..22: mol_type = other RNA
attattatatgcatcaggtgca

SEQ ID NO: 36211 - RNA, 22 nt, synthetic construct
  source 1..22: mol_type = other RNA
attattcactttatacaggaag

SEQ ID NO: 36212 - RNA, 22 nt, synthetic construct
  source 1..22: mol_type = other RNA
attcactttatacaggaagaga

SEQ ID NO: 36213 - RNA, 22 nt, synthetic construct
  source 1..22: mol_type = other RNA
attgctgccaatgattatttaa

SEQ ID NO: 36214 - RNA, 22 nt, synthetic construct
  source 1..22: mol_type = other RNA
atttgcaaaacctgtccactct

SEQ ID NO: 36215 - RNA, 22 nt, synthetic construct
  source 1..22: mol_type = other RNA
caaaacctgtccactcttatgg

SEQ ID NO: 36216 - RNA, 22 nt, synthetic construct
  source 1..22: mol_type = other RNA
caaatgagactccagtttctct

SEQ ID NO: 36217 - RNA, 22 nt, synthetic construct
  source 1..22: mol_type = other RNA
caacatataagaaacttgcacc

SEQ ID NO: 36218 - RNA, 22 nt, synthetic construct
  source 1..22: mol_type = other RNA
caagtttcttatatgttggtgc

SEQ ID NO: 36219 - RNA, 22 nt, synthetic construct
  source 1..22: mol_type = other RNA
caattgctgccaatgattattt

SEQ ID NO: 36220 - RNA, 22 nt, synthetic construct
  source 1..22: mol_type = other RNA
caccaacatataagaaacttgc

SEQ ID NO: 36221 - RNA, 22 nt, synthetic construct
  source 1..22: mol_type = other RNA
cacctgatgcatataataatca

SEQ ID NO: 36222 - RNA, 22 nt, synthetic construct
  source 1..22: mol_type = other RNA
cactcttatggcaccaacatat

SEQ ID NO: 36223 - RNA, 22 nt, synthetic construct
  source 1..22: mol_type = other RNA
cactttatacaggaagagaaac

SEQ ID NO: 36224 - RNA, 22 nt, synthetic construct
  source 1..22: mol_type = other RNA
caggaagagaaactggagtctc

SEQ ID NO: 36225 - RNA, 22 nt, synthetic construct
  source 1..22: mol_type = other RNA
caggtgcaagtttcttatatgt

SEQ ID NO: 36226 - RNA, 22 nt, synthetic construct
  source 1..22: mol_type = other RNA
caggttttgcaaatgagactcc

SEQ ID NO: 36227 - RNA, 22 nt, synthetic construct
  source 1..22: mol_type = other RNA
cagtttctcttcctgtataaag

SEQ ID NO: 36228 - RNA, 22 nt, synthetic construct
  source 1..22: mol_type = other RNA
cataagagtggacaggttttgc

SEQ ID NO: 36229 - RNA, 22 nt, synthetic construct
  source 1..22: mol_type = other RNA
catataagaaacttgcacctga

SEQ ID NO: 36230 - RNA, 22 nt, synthetic construct
  source 1..22: mol_type = other RNA
catcaggtgcaagtttcttata

SEQ ID NO: 36231 - RNA, 22 nt, synthetic construct
  source 1..22: mol_type = other RNA
catttgcaaaacctgtccactc

SEQ ID NO: 36232 - RNA, 22 nt, synthetic construct
  source 1..22: mol_type = other RNA
ccaacatataagaaacttgcac

SEQ ID NO: 36233 - RNA, 22 nt, synthetic construct
  source 1..22: mol_type = other RNA
ccaatgattatttaaacttacc

SEQ ID NO: 36234 - RNA, 22 nt, synthetic construct
  source 1..22: mol_type = other RNA
ccactcttatggcaccaacata

SEQ ID NO: 36235 - RNA, 22 nt, synthetic construct
  source 1..22: mol_type = other RNA
ccagtttctcttcctgtataaa

SEQ ID NO: 36236 - RNA, 22 nt, synthetic construct
  source 1..22: mol_type = other RNA
ccataagagtggacaggttttg

SEQ ID NO: 36237 - RNA, 22 nt, synthetic construct
  source 1..22: mol_type = other RNA
cctgatgcatataataatcagg

SEQ ID NO: 36238 - RNA, 22 nt, synthetic construct
  source 1..22: mol_type = other RNA
cctgattattatatgcatcagg

SEQ ID NO: 36239 - RNA, 22 nt, synthetic construct
  source 1..22: mol_type = other RNA
cctgtataaagtgaataattct

SEQ ID NO: 36240 - RNA, 22 nt, synthetic construct
  source 1..22: mol_type = other RNA
cctgtccactcttatggcacca

SEQ ID NO: 36241 - RNA, 22 nt, synthetic construct
  source 1..22: mol_type = other RNA
ctcatttgcaaaacctgtccac

SEQ ID NO: 36242 - RNA, 22 nt, synthetic construct
  source 1..22: mol_type = other RNA
ctccagtttctcttcctgtata

SEQ ID NO: 36243 - RNA, 22 nt, synthetic construct
  source 1..22: mol_type = other RNA
ctcttatggcaccaacatataa

SEQ ID NO: 36244 - RNA, 22 nt, synthetic construct
  source 1..22: mol_type = other RNA
ctcttcctgtataaagtgaata

SEQ ID NO: 36245 - RNA, 22 nt, synthetic construct
  source 1..22: mol_type = other RNA
ctgatgcatataataatcaggt

SEQ ID NO: 36246 - RNA, 22 nt, synthetic construct
  source 1..22: mol_type = other RNA
ctgattattatatgcatcaggt

SEQ ID NO: 36247 - RNA, 22 nt, synthetic construct
  source 1..22: mol_type = other RNA
ctgccaatgattatttaaactt

SEQ ID NO: 36248 - RNA, 22 nt, synthetic construct
  source 1..22: mol_type = other RNA
ctggagtctcatttgcaaaacc

SEQ ID NO: 36249 - RNA, 22 nt, synthetic construct
  source 1..22: mol_type = other RNA
ctgtccactcttatggcaccaa

SEQ ID NO: 36250 - RNA, 22 nt, synthetic construct
  source 1..22: mol_type = other RNA
cttacctgattattatatgcat

SEQ ID NO: 36251 - RNA, 22 nt, synthetic construct
  source 1..22: mol_type = other RNA
cttatatgttggtgccataaga

SEQ ID NO: 36252 - RNA, 22 nt, synthetic construct
  source 1..22: mol_type = other RNA
cttatggcaccaacatataaga

SEQ ID NO: 36253 - RNA, 22 nt, synthetic construct
  source 1..22: mol_type = other RNA
cttcctgtataaagtgaataat

SEQ ID NO: 36254 - RNA, 22 nt, synthetic construct
  source 1..22: mol_type = other RNA
cttgcacctgatgcatataata

SEQ ID NO: 36255 - RNA, 22 nt, synthetic construct
  source 1..22: mol_type = other RNA
ctttatacaggaagagaaactg

SEQ ID NO: 36256 - RNA, 22 nt, synthetic construct
  source 1..22: mol_type = other RNA
gaaactggagtctcatttgcaa

SEQ ID NO: 36257 - RNA, 22 nt, synthetic construct
  source 1..22: mol_type = other RNA
gaaacttgcacctgatgcatat

SEQ ID NO: 36258 - RNA, 22 nt, synthetic construct
  source 1..22: mol_type = other RNA
gaagagaaactggagtctcatt

SEQ ID NO: 36259 - RNA, 22 nt, synthetic construct
  source 1..22: mol_type = other RNA
gaattattcactttatacagga

SEQ ID NO: 36260 - RNA, 22 nt, synthetic construct
  source 1..22: mol_type = other RNA
gacaggttttgcaaatgagact

SEQ ID NO: 36261 - RNA, 22 nt, synthetic construct
  source 1..22: mol_type = other RNA
gactccagtttctcttcctgta

SEQ ID NO: 36262 - RNA, 22 nt, synthetic construct
  source 1..22: mol_type = other RNA
gagaaactggagtctcatttgc

SEQ ID NO: 36263 - RNA, 22 nt, synthetic construct
  source 1..22: mol_type = other RNA
gagactccagtttctcttcctg

SEQ ID NO: 36264 - RNA, 22 nt, synthetic construct
  source 1..22: mol_type = other RNA
gagtctcatttgcaaaacctgt

SEQ ID NO: 36265 - RNA, 22 nt, synthetic construct
  source 1..22: mol_type = other RNA
gagtggacaggttttgcaaatg

SEQ ID NO: 36266 - RNA, 22 nt, synthetic construct
  source 1..22: mol_type = other RNA
gatgcatataataatcaggtaa

SEQ ID NO: 36267 - RNA, 22 nt, synthetic construct
  source 1..22: mol_type = other RNA
gattattatatgcatcaggtgc

SEQ ID NO: 36268 - RNA, 22 nt, synthetic construct
  source 1..22: mol_type = other RNA
gcaaaacctgtccactcttatg

SEQ ID NO: 36269 - RNA, 22 nt, synthetic construct
  source 1..22: mol_type = other RNA
gcaaatgagactccagtttctc

SEQ ID NO: 36270 - RNA, 22 nt, synthetic construct
  source 1..22: mol_type = other RNA
gcaagtttcttatatgttggtg

SEQ ID NO: 36271 - RNA, 22 nt, synthetic construct
  source 1..22: mol_type = other RNA
gcaccaacatataagaaacttg

SEQ ID NO: 36272 - RNA, 22 nt, synthetic construct
  source 1..22: mol_type = other RNA
gcacctgatgcatataataatc

SEQ ID NO: 36273 - RNA, 22 nt, synthetic construct
  source 1..22: mol_type = other RNA
gcatataataatcaggtaagtt

SEQ ID NO: 36274 - RNA, 22 nt, synthetic construct
  source 1..22: mol_type = other RNA
gcatcaggtgcaagtttcttat

SEQ ID NO: 36275 - RNA, 22 nt, synthetic construct
  source 1..22: mol_type = other RNA
gccaatgattatttaaacttac

SEQ ID NO: 36276 - RNA, 22 nt, synthetic construct
  source 1..22: mol_type = other RNA
gccataagagtggacaggtttt

SEQ ID NO: 36277 - RNA, 22 nt, synthetic construct
  source 1..22: mol_type = other RNA
gctgccaatgattatttaaact

SEQ ID NO: 36278 - RNA, 22 nt, synthetic construct
  source 1..22: mol_type = other RNA
ggaagagaaactggagtctcat

SEQ ID NO: 36279 - RNA, 22 nt, synthetic construct
  source 1..22: mol_type = other RNA
ggacaggttttgcaaatgagac

SEQ ID NO: 36280 - RNA, 22 nt, synthetic construct
  source 1..22: mol_type = other RNA
ggagtctcatttgcaaaacctg

SEQ ID NO: 36281 - RNA, 22 nt, synthetic construct
  source 1..22: mol_type = other RNA
ggcaccaacatataagaaactt

SEQ ID NO: 36282 - RNA, 22 nt, synthetic construct
  source 1..22: mol_type = other RNA
ggtaagtttaaataatcattgg

SEQ ID NO: 36283 - RNA, 22 nt, synthetic construct
  source 1..22: mol_type = other RNA
ggtgcaagtttcttatatgttg

SEQ ID NO: 36284 - RNA, 22 nt, synthetic construct
  source 1..22: mol_type = other RNA
ggtgccataagagtggacaggt

SEQ ID NO: 36285 - RNA, 22 nt, synthetic construct
  source 1..22: mol_type = other RNA
ggttttgcaaatgagactccag

SEQ ID NO: 36286 - RNA, 22 nt, synthetic construct
  source 1..22: mol_type = other RNA
gtaagtttaaataatcattggc

SEQ ID NO: 36287 - RNA, 22 nt, synthetic construct
  source 1..22: mol_type = other RNA
gtccactcttatggcaccaaca

SEQ ID NO: 36288 - RNA, 22 nt, synthetic construct
  source 1..22: mol_type = other RNA
gtctcatttgcaaaacctgtcc

SEQ ID NO: 36289 - RNA, 22 nt, synthetic construct
  source 1..22: mol_type = other RNA
gtgcaagtttcttatatgttgg

SEQ ID NO: 36290 - RNA, 22 nt, synthetic construct
  source 1..22: mol_type = other RNA
gtgccataagagtggacaggtt

SEQ ID NO: 36291 - RNA, 22 nt, synthetic construct
  source 1..22: mol_type = other RNA
gtggacaggttttgcaaatgag

SEQ ID NO: 36292 - RNA, 22 nt, synthetic construct
  source 1..22: mol_type = other RNA
gttacaattgctgccaatgatt

SEQ ID NO: 36293 - RNA, 22 nt, synthetic construct
  source 1..22: mol_type = other RNA
gttggtgccataagagtggaca

SEQ ID NO: 36294 - RNA, 22 nt, synthetic construct
  source 1..22: mol_type = other RNA
gttgttacaattgctgccaatg

SEQ ID NO: 36295 - RNA, 22 nt, synthetic construct
  source 1..22: mol_type = other RNA
gtttaaataatcattggcagca

SEQ ID NO: 36296 - RNA, 22 nt, synthetic construct
  source 1..22: mol_type = other RNA
gtttctcttcctgtataaagtg

SEQ ID NO: 36297 - RNA, 22 nt, synthetic construct
  source 1..22: mol_type = other RNA
gtttcttatatgttggtgccat

SEQ ID NO: 36298 - RNA, 22 nt, synthetic construct
  source 1..22: mol_type = other RNA
gttttgcaaatgagactccagt

SEQ ID NO: 36299 - RNA, 22 nt, synthetic construct
  source 1..22: mol_type = other RNA
taaataatcattggcagcaatt

SEQ ID NO: 36300 - RNA, 22 nt, synthetic construct
  source 1..22: mol_type = other RNA
taagaaacttgcacctgatgca

SEQ ID NO: 36301 - RNA, 22 nt, synthetic construct
  source 1..22: mol_type = other RNA
taagagtggacaggttttgcaa

SEQ ID NO: 36302 - RNA, 22 nt, synthetic construct
  source 1..22: mol_type = other RNA
tacaattgctgccaatgattat

SEQ ID NO: 36303 - RNA, 22 nt, synthetic construct
  source 1..22: mol_type = other RNA
tacaggaagagaaactggagtc

SEQ ID NO: 36304 - RNA, 22 nt, synthetic construct
  source 1..22: mol_type = other RNA
tacctgattattatatgcatca

SEQ ID NO: 36305 - RNA, 22 nt, synthetic construct
  source 1..22: mol_type = other RNA
tataagaaacttgcacctgatg

SEQ ID NO: 36306 - RNA, 22 nt, synthetic construct
  source 1..22: mol_type = other RNA
tatacaggaagagaaactggag

SEQ ID NO: 36307 - RNA, 22 nt, synthetic construct
  source 1..22: mol_type = other RNA
tatatgcatcaggtgcaagttt

SEQ ID NO: 36308 - RNA, 22 nt, synthetic construct
  source 1..22: mol_type = other RNA
tatatgttggtgccataagagt

SEQ ID NO: 36309 - RNA, 22 nt, synthetic construct
  source 1..22: mol_type = other RNA
tatgcatcaggtgcaagtttct

SEQ ID NO: 36310 - RNA, 22 nt, synthetic construct
  source 1..22: mol_type = other RNA
tatggcaccaacatataagaaa

SEQ ID NO: 36311 - RNA, 22 nt, synthetic construct
  source 1..22: mol_type = other RNA
tatgttggtgccataagagtgg

SEQ ID NO: 36312 - RNA, 22 nt, synthetic construct
  source 1..22: mol_type = other RNA
tattatatgcatcaggtgcaag

SEQ ID NO: 36313 - RNA, 22 nt, synthetic construct
  source 1..22: mol_type = other RNA
tattcactttatacaggaagag

SEQ ID NO: 36314 - RNA, 22 nt, synthetic construct
  source 1..22: mol_type = other RNA
tcactttatacaggaagagaaa

SEQ ID NO: 36315 - RNA, 22 nt, synthetic construct
  source 1..22: mol_type = other RNA
tcaggtgcaagtttcttatatg

SEQ ID NO: 36316 - RNA, 22 nt, synthetic construct
  source 1..22: mol_type = other RNA
tcatttgcaaaacctgtccact

SEQ ID NO: 36317 - RNA, 22 nt, synthetic construct
  source 1..22: mol_type = other RNA
tccactcttatggcaccaacat

SEQ ID NO: 36318 - RNA, 22 nt, synthetic construct
  source 1..22: mol_type = other RNA
tccagtttctcttcctgtataa

SEQ ID NO: 36319 - RNA, 22 nt, synthetic construct
  source 1..22: mol_type = other RNA
tcctgtataaagtgaataattc

SEQ ID NO: 36320 - RNA, 22 nt, synthetic construct
  source 1..22: mol_type = other RNA
tctcatttgcaaaacctgtcca

SEQ ID NO: 36321 - RNA, 22 nt, synthetic construct
  source 1..22: mol_type = other RNA
tctcttcctgtataaagtgaat

SEQ ID NO: 36322 - RNA, 22 nt, synthetic construct
  source 1..22: mol_type = other RNA
tcttatatgttggtgccataag

SEQ ID NO: 36323 - RNA, 22 nt, synthetic construct
  source 1..22: mol_type = other RNA
tcttatggcaccaacatataag

SEQ ID NO: 36324 - RNA, 22 nt, synthetic construct
  source 1..22: mol_type = other RNA
tcttcctgtataaagtgaataa

SEQ ID NO: 36325 - RNA, 22 nt, synthetic construct
  source 1..22: mol_type = other RNA
tgagactccagtttctcttcct

SEQ ID NO: 36326 - RNA, 22 nt, synthetic construct
  source 1..22: mol_type = other RNA
tgatgcatataataatcaggta

SEQ ID NO: 36327 - RNA, 22 nt, synthetic construct
  source 1..22: mol_type = other RNA
tgattattatatgcatcaggtg

SEQ ID NO: 36328 - RNA, 22 nt, synthetic construct
  source 1..22: mol_type = other RNA
tgcaaaacctgtccactcttat

SEQ ID NO: 36329 - RNA, 22 nt, synthetic construct
  source 1..22: mol_type = other RNA
tgcaaatgagactccagtttct

SEQ ID NO: 36330 - RNA, 22 nt, synthetic construct
  source 1..22: mol_type = other RNA
tgcaagtttcttatatgttggt

SEQ ID NO: 36331 - RNA, 22 nt, synthetic construct
  source 1..22: mol_type = other RNA
tgcacctgatgcatataataat

SEQ ID NO: 36332 - RNA, 22 nt, synthetic construct
  source 1..22: mol_type = other RNA
tgcatataataatcaggtaagt

SEQ ID NO: 36333 - RNA, 22 nt, synthetic construct
  source 1..22: mol_type = other RNA
tgcatcaggtgcaagtttctta

SEQ ID NO: 36334 - RNA, 22 nt, synthetic construct
  source 1..22: mol_type = other RNA
tgccataagagtggacaggttt

SEQ ID NO: 36335 - RNA, 22 nt, synthetic construct
  source 1..22: mol_type = other RNA
tgctgccaatgattatttaaac

SEQ ID NO: 36336 - RNA, 22 nt, synthetic construct
  source 1..22: mol_type = other RNA
tggacaggttttgcaaatgaga

SEQ ID NO: 36337 - RNA, 22 nt, synthetic construct
  source 1..22: mol_type = other RNA
tggagtctcatttgcaaaacct

SEQ ID NO: 36338 - RNA, 22 nt, synthetic construct
  source 1..22: mol_type = other RNA
tggcaccaacatataagaaact

SEQ ID NO: 36339 - RNA, 22 nt, synthetic construct
  source 1..22: mol_type = other RNA
tggtgccataagagtggacagg

SEQ ID NO: 36340 - RNA, 22 nt, synthetic construct
  source 1..22: mol_type = other RNA
tgtccactcttatggcaccaac

SEQ ID NO: 36341 - RNA, 22 nt, synthetic construct
  source 1..22: mol_type = other RNA
tgttacaattgctgccaatgat

SEQ ID NO: 36342 - RNA, 22 nt, synthetic construct
  source 1..22: mol_type = other RNA
tgttggtgccataagagtggac

SEQ ID NO: 36343 - RNA, 22 nt, synthetic construct
  source 1..22: mol_type = other RNA
ttaaataatcattggcagcaat

SEQ ID NO: 36344 - RNA, 22 nt, synthetic construct
  source 1..22: mol_type = other RNA
ttacaattgctgccaatgatta

SEQ ID NO: 36345 - RNA, 22 nt, synthetic construct
  source 1..22: mol_type = other RNA
ttacctgattattatatgcatc

SEQ ID NO: 36346 - RNA, 22 nt, synthetic construct
  source 1..22: mol_type = other RNA
ttatacaggaagagaaactgga

SEQ ID NO: 36347 - RNA, 22 nt, synthetic construct
  source 1..22: mol_type = other RNA
ttatatgcatcaggtgcaagtt

SEQ ID NO: 36348 - RNA, 22 nt, synthetic construct
  source 1..22: mol_type = other RNA
ttatatgttggtgccataagag

SEQ ID NO: 36349 - RNA, 22 nt, synthetic construct
  source 1..22: mol_type = other RNA
ttatggcaccaacatataagaa

SEQ ID NO: 36350 - RNA, 22 nt, synthetic construct
  source 1..22: mol_type = other RNA
ttattatatgcatcaggtgcaa

SEQ ID NO: 36351 - RNA, 22 nt, synthetic construct
  source 1..22: mol_type = other RNA
ttattcactttatacaggaaga

SEQ ID NO: 36352 - RNA, 22 nt, synthetic construct
  source 1..22: mol_type = other RNA
ttcactttatacaggaagagaa

SEQ ID NO: 36353 - RNA, 22 nt, synthetic construct
  source 1..22: mol_type = other RNA
ttctcttcctgtataaagtgaa

SEQ ID NO: 36354 - RNA, 22 nt, synthetic construct
  source 1..22: mol_type = other RNA
ttcttatatgttggtgccataa

SEQ ID NO: 36355 - RNA, 22 nt, synthetic construct
  source 1..22: mol_type = other RNA
ttgcaaaacctgtccactctta

SEQ ID NO: 36356 - RNA, 22 nt, synthetic construct
  source 1..22: mol_type = other RNA
ttgcaaatgagactccagtttc

SEQ ID NO: 36357 - RNA, 22 nt, synthetic construct
  source 1..22: mol_type = other RNA
ttgcacctgatgcatataataa

SEQ ID NO: 36358 - RNA, 22 nt, synthetic construct
  source 1..22: mol_type = other RNA
ttgctgccaatgattatttaaa

SEQ ID NO: 36359 - RNA, 22 nt, synthetic construct
  source 1..22: mol_type = other RNA
ttggtgccataagagtggacag

SEQ ID NO: 36360 - RNA, 22 nt, synthetic construct
  source 1..22: mol_type = other RNA
ttgttacaattgctgccaatga

SEQ ID NO: 36361 - RNA, 22 nt, synthetic construct
  source 1..22: mol_type = other RNA
tttaaataatcattggcagcaa

SEQ ID NO: 36362 - RNA, 22 nt, synthetic construct
  source 1..22: mol_type = other RNA
tttatacaggaagagaaactgg

SEQ ID NO: 36363 - RNA, 22 nt, synthetic construct
  source 1..22: mol_type = other RNA
tttctcttcctgtataaagtga

SEQ ID NO: 36364 - RNA, 22 nt, synthetic construct
  source 1..22: mol_type = other RNA
tttcttatatgttggtgccata

SEQ ID NO: 36365 - RNA, 22 nt, synthetic construct
  source 1..22: mol_type = other RNA
tttgcaaaacctgtccactctt

SEQ ID NO: 36366 - RNA, 22 nt, synthetic construct
  source 1..22: mol_type = other RNA
tttgcaaatgagactccagttt

SEQ ID NO: 36367 - RNA, 22 nt, synthetic construct
  source 1..22: mol_type = other RNA
ttttgcaaatgagactccagtt

SEQ ID NO: 36368 - RNA, 20 nt, synthetic construct
  source 1..20: mol_type = other RNA
aaaaataaaagtgtgtgtga

SEQ ID NO: 36369 - RNA, 20 nt, synthetic construct
  source 1..20: mol_type = other RNA
aaaagtgtgtgtgaatgcga

SEQ ID NO: 36370 - RNA, 20 nt, synthetic construct
  source 1..20: mol_type = other RNA
aaaataaaagtgtgtgtgaa

SEQ ID NO: 36371 - RNA, 20 nt, synthetic construct
  source 1..20: mol_type = other RNA
aaacatgcagtgacccctga

SEQ ID NO: 36372 - RNA, 20 nt, synthetic construct
  source 1..20: mol_type = other RNA
aaagtgtgtgtgaatgcgaa

SEQ ID NO: 36373 - RNA, 20 nt, synthetic construct
  source 1..20: mol_type = other RNA
aaataaaagtgtgtgtgaat

SEQ ID NO: 36374 - RNA, 20 nt, synthetic construct
  source 1..20: mol_type = other RNA
aacacagagcaccagagtgc

SEQ ID NO: 36375 - RNA, 20 nt, synthetic construct
  source 1..20: mol_type = other RNA
aacagctgctaagctgtcct

SEQ ID NO: 36376 - RNA, 20 nt, synthetic construct
  source 1..20: mol_type = other RNA
aacatgcagaatggcagcac

SEQ ID NO: 36377 - RNA, 20 nt, synthetic construct
  source 1..20: mol_type = other RNA
aacatgcagtgacccctgag

SEQ ID NO: 36378 - RNA, 20 nt, synthetic construct
  source 1..20: mol_type = other RNA
aactactttcgcattcacac

SEQ ID NO: 36379 - RNA, 20 nt, synthetic construct
  source 1..20: mol_type = other RNA
aacttaccaatgtgctgcca

SEQ ID NO: 36380 - RNA, 20 nt, synthetic construct
  source 1..20: mol_type = other RNA
aagctgtcctcagcccaact

SEQ ID NO: 36381 - RNA, 20 nt, synthetic construct
  source 1..20: mol_type = other RNA
aaggaaggccgtccattctc

SEQ ID NO: 36382 - RNA, 20 nt, synthetic construct
  source 1..20: mol_type = other RNA
aaggccgtccattctcaggg

SEQ ID NO: 36383 - RNA, 20 nt, synthetic construct
  source 1..20: mol_type = other RNA
aagtccaaacatgcagtgac

SEQ ID NO: 36384 - RNA, 20 nt, synthetic construct
  source 1..20: mol_type = other RNA
aagtctctgtgggcatgagc

SEQ ID NO: 36385 - RNA, 20 nt, synthetic construct
  source 1..20: mol_type = other RNA
aagtgtgtgtgaatgcgaaa

SEQ ID NO: 36386 - RNA, 20 nt, synthetic construct
  source 1..20: mol_type = other RNA
aagttgggctgaggacagct

SEQ ID NO: 36387 - RNA, 20 nt, synthetic construct
  source 1..20: mol_type = other RNA
aataaaagtgtgtgtgaatg

SEQ ID NO: 36388 - RNA, 20 nt, synthetic construct
  source 1..20: mol_type = other RNA
aatatgaacacagagcacca

SEQ ID NO: 36389 - RNA, 20 nt, synthetic construct
  source 1..20: mol_type = other RNA
aatggacggccttccttcag

SEQ ID NO: 36390 - RNA, 20 nt, synthetic construct
  source 1..20: mol_type = other RNA
aatggcagcacattggtaag

SEQ ID NO: 36391 - RNA, 20 nt, synthetic construct
  source 1..20: mol_type = other RNA
aatgtgctgccattctgcat

SEQ ID NO: 36392 - RNA, 20 nt, synthetic construct
  source 1..20: mol_type = other RNA
acaacatgcagaatggcagc

SEQ ID NO: 36393 - RNA, 20 nt, synthetic construct
  source 1..20: mol_type = other RNA
acacacacttttatttttca

SEQ ID NO: 36394 - RNA, 20 nt, synthetic construct
  source 1..20: mol_type = other RNA
acacacttttatttttcaga

SEQ ID NO: 36395 - RNA, 20 nt, synthetic construct
  source 1..20: mol_type = other RNA
acacagagcaccagagtgcc

SEQ ID NO: 36396 - RNA, 20 nt, synthetic construct
  source 1..20: mol_type = other RNA
acagaagtccaaacatgcag

SEQ ID NO: 36397 - RNA, 20 nt, synthetic construct
  source 1..20: mol_type = other RNA
acagagacttgcacaacatg

SEQ ID NO: 36398 - RNA, 20 nt, synthetic construct
  source 1..20: mol_type = other RNA
acagagcaccagagtgccgt

SEQ ID NO: 36399 - RNA, 20 nt, synthetic construct
  source 1..20: mol_type = other RNA
acagctgctaagctgtcctc

SEQ ID NO: 36400 - RNA, 20 nt, synthetic construct
  source 1..20: mol_type = other RNA
acatgcagaatggcagcaca

SEQ ID NO: 36401 - RNA, 20 nt, synthetic construct
  source 1..20: mol_type = other RNA
acatgcagtgacccctgaga

SEQ ID NO: 36402 - RNA, 20 nt, synthetic construct
  source 1..20: mol_type = other RNA
acattggtaagttgggctga

SEQ ID NO: 36403 - RNA, 20 nt, synthetic construct
  source 1..20: mol_type = other RNA
accaatgtgctgccattctg

SEQ ID NO: 36404 - RNA, 20 nt, synthetic construct
  source 1..20: mol_type = other RNA
accagagtgccgtctgggtc

SEQ ID NO: 36405 - RNA, 20 nt, synthetic construct
  source 1..20: mol_type = other RNA
acccagacggcactctggtg

SEQ ID NO: 36406 - RNA, 20 nt, synthetic construct
  source 1..20: mol_type = other RNA
acccctgagaatggacggcc

SEQ ID NO: 36407 - RNA, 20 nt, synthetic construct
  source 1..20: mol_type = other RNA
acggcactctggtgctctgt

SEQ ID NO: 36408 - RNA, 20 nt, synthetic construct
  source 1..20: mol_type = other RNA
acggccttccttcagaccca

SEQ ID NO: 36409 - RNA, 20 nt, synthetic construct
  source 1..20: mol_type = other RNA
actactttcgcattcacaca

SEQ ID NO: 36410 - RNA, 20 nt, synthetic construct
  source 1..20: mol_type = other RNA
actcaacagctgctaagctg

SEQ ID NO: 36411 - RNA, 20 nt, synthetic construct
  source 1..20: mol_type = other RNA
actctggtgctctgtgttca

SEQ ID NO: 36412 - RNA, 20 nt, synthetic construct
  source 1..20: mol_type = other RNA
actgcatgtttggacttctg

SEQ ID NO: 36413 - RNA, 20 nt, synthetic construct
  source 1..20: mol_type = other RNA
acttaccaatgtgctgccat

SEQ ID NO: 36414 - RNA, 20 nt, synthetic construct
  source 1..20: mol_type = other RNA
acttctgtgctcatgcccac

SEQ ID NO: 36415 - RNA, 20 nt, synthetic construct
  source 1..20: mol_type = other RNA
acttgcacaacatgcagaat

SEQ ID NO: 36416 - RNA, 20 nt, synthetic construct
  source 1..20: mol_type = other RNA
actttcgcattcacacacac

SEQ ID NO: 36417 - RNA, 20 nt, synthetic construct
  source 1..20: mol_type = other RNA
agaagtccaaacatgcagtg

SEQ ID NO: 36418 - RNA, 20 nt, synthetic construct
  source 1..20: mol_type = other RNA
agaatggacggccttccttc

SEQ ID NO: 36419 - RNA, 20 nt, synthetic construct
  source 1..20: mol_type = other RNA
agaatggcagcacattggta

SEQ ID NO: 36420 - RNA, 20 nt, synthetic construct
  source 1..20: mol_type = other RNA
agacccagacggcactctgg

SEQ ID NO: 36421 - RNA, 20 nt, synthetic construct
  source 1..20: mol_type = other RNA
agacggcactctggtgctct

SEQ ID NO: 36422 - RNA, 20 nt, synthetic construct
  source 1..20: mol_type = other RNA
agacttgcacaacatgcaga

SEQ ID NO: 36423 - RNA, 20 nt, synthetic construct
  source 1..20: mol_type = other RNA
agagacttgcacaacatgca

SEQ ID NO: 36424 - RNA, 20 nt, synthetic construct
  source 1..20: mol_type = other RNA
agagcaccagagtgccgtct

SEQ ID NO: 36425 - RNA, 20 nt, synthetic construct
  source 1..20: mol_type = other RNA
agagtgccgtctgggtctga

SEQ ID NO: 36426 - RNA, 20 nt, synthetic construct
  source 1..20: mol_type = other RNA
agattgaatatgaacacaga

SEQ ID NO: 36427 - RNA, 20 nt, synthetic construct
  source 1..20: mol_type = other RNA
agcacagaagtccaaacatg

SEQ ID NO: 36428 - RNA, 20 nt, synthetic construct
  source 1..20: mol_type = other RNA
agcacattggtaagttgggc

SEQ ID NO: 36429 - RNA, 20 nt, synthetic construct
  source 1..20: mol_type = other RNA
agcaccagagtgccgtctgg

SEQ ID NO: 36430 - RNA, 20 nt, synthetic construct
  source 1..20: mol_type = other RNA
agcccaacttaccaatgtgc

SEQ ID NO: 36431 - RNA, 20 nt, synthetic construct
  source 1..20: mol_type = other RNA
agctgctaagctgtcctcag

SEQ ID NO: 36432 - RNA, 20 nt, synthetic construct
  source 1..20: mol_type = other RNA
agctgtcctcagcccaactt

SEQ ID NO: 36433 - RNA, 20 nt, synthetic construct
  source 1..20: mol_type = other RNA
aggaaggccgtccattctca

SEQ ID NO: 36434 - RNA, 20 nt, synthetic construct
  source 1..20: mol_type = other RNA
aggccgtccattctcagggg

SEQ ID NO: 36435 - RNA, 20 nt, synthetic construct
  source 1..20: mol_type = other RNA
aggggtcactgcatgtttgg

SEQ ID NO: 36436 - RNA, 20 nt, synthetic construct
  source 1..20: mol_type = other RNA
agtccaaacatgcagtgacc

SEQ ID NO: 36437 - RNA, 20 nt, synthetic construct
  source 1..20: mol_type = other RNA
agtctctgtgggcatgagca

SEQ ID NO: 36438 - RNA, 20 nt, synthetic construct
  source 1..20: mol_type = other RNA
agtgacccctgagaatggac

SEQ ID NO: 36439 - RNA, 20 nt, synthetic construct
  source 1..20: mol_type = other RNA
agtgccgtctgggtctgaag

SEQ ID NO: 36440 - RNA, 20 nt, synthetic construct
  source 1..20: mol_type = other RNA
agttgggctgaggacagctt

SEQ ID NO: 36441 - RNA, 20 nt, synthetic construct
  source 1..20: mol_type = other RNA
ataaaagtgtgtgtgaatgc

SEQ ID NO: 36442 - RNA, 20 nt, synthetic construct
  source 1..20: mol_type = other RNA
atatgaacacagagcaccag

SEQ ID NO: 36443 - RNA, 20 nt, synthetic construct
  source 1..20: mol_type = other RNA
atctgaaaaataaaagtgtg

SEQ ID NO: 36444 - RNA, 20 nt, synthetic construct
  source 1..20: mol_type = other RNA
atgaacacagagcaccagag

SEQ ID NO: 36445 - RNA, 20 nt, synthetic construct
  source 1..20: mol_type = other RNA
atgagcacagaagtccaaac

SEQ ID NO: 36446 - RNA, 20 nt, synthetic construct
  source 1..20: mol_type = other RNA
atgcagaatggcagcacatt

SEQ ID NO: 36447 - RNA, 20 nt, synthetic construct
  source 1..20: mol_type = other RNA
atgcagtgacccctgagaat

SEQ ID NO: 36448 - RNA, 20 nt, synthetic construct
  source 1..20: mol_type = other RNA
atgcccacagagacttgcac

SEQ ID NO: 36449 - RNA, 20 nt, synthetic construct
  source 1..20: mol_type = other RNA
atggacggccttccttcaga

SEQ ID NO: 36450 - RNA, 20 nt, synthetic construct
  source 1..20: mol_type = other RNA
atggcagcacattggtaagt

SEQ ID NO: 36451 - RNA, 20 nt, synthetic construct
  source 1..20: mol_type = other RNA
atgtgctgccattctgcatg

SEQ ID NO: 36452 - RNA, 20 nt, synthetic construct
  source 1..20: mol_type = other RNA
atgttgtgcaagtctctgtg

SEQ ID NO: 36453 - RNA, 20 nt, synthetic construct
  source 1..20: mol_type = other RNA
atgtttggacttctgtgctc

SEQ ID NO: 36454 - RNA, 20 nt, synthetic construct
  source 1..20: mol_type = other RNA
attcacacacacttttattt

SEQ ID NO: 36455 - RNA, 20 nt, synthetic construct
  source 1..20: mol_type = other RNA
attctcaggggtcactgcat

SEQ ID NO: 36456 - RNA, 20 nt, synthetic construct
  source 1..20: mol_type = other RNA
attctgcatgttgtgcaagt

SEQ ID NO: 36457 - RNA, 20 nt, synthetic construct
  source 1..20: mol_type = other RNA
attgaatatgaacacagagc

SEQ ID NO: 36458 - RNA, 20 nt, synthetic construct
  source 1..20: mol_type = other RNA
attggtaagttgggctgagg

SEQ ID NO: 36459 - RNA, 20 nt, synthetic construct
  source 1..20: mol_type = other RNA
caaacatgcagtgacccctg

SEQ ID NO: 36460 - RNA, 20 nt, synthetic construct
  source 1..20: mol_type = other RNA
caacagctgctaagctgtcc

SEQ ID NO: 36461 - RNA, 20 nt, synthetic construct
  source 1..20: mol_type = other RNA
caacatgcagaatggcagca

SEQ ID NO: 36462 - RNA, 20 nt, synthetic construct
  source 1..20: mol_type = other RNA
caacttaccaatgtgctgcc

SEQ ID NO: 36463 - RNA, 20 nt, synthetic construct
  source 1..20: mol_type = other RNA
caagtctctgtgggcatgag

SEQ ID NO: 36464 - RNA, 20 nt, synthetic construct
  source 1..20: mol_type = other RNA
caatctgaaaaataaaagtg

SEQ ID NO: 36465 - RNA, 20 nt, synthetic construct
  source 1..20: mol_type = other RNA
caatgtgctgccattctgca

SEQ ID NO: 36466 - RNA, 20 nt, synthetic construct
  source 1..20: mol_type = other RNA
cacaacatgcagaatggcag

SEQ ID NO: 36467 - RNA, 20 nt, synthetic construct
  source 1..20: mol_type = other RNA
cacacacacttttatttttc

SEQ ID NO: 36468 - RNA, 20 nt, synthetic construct
  source 1..20: mol_type = other RNA
cacacacttttatttttcag

SEQ ID NO: 36469 - RNA, 20 nt, synthetic construct
  source 1..20: mol_type = other RNA
cacacttttatttttcagat

SEQ ID NO: 36470 - RNA, 20 nt, synthetic construct
  source 1..20: mol_type = other RNA
cacagaagtccaaacatgca

SEQ ID NO: 36471 - RNA, 20 nt, synthetic construct
  source 1..20: mol_type = other RNA
cacagagacttgcacaacat

SEQ ID NO: 36472 - RNA, 20 nt, synthetic construct
  source 1..20: mol_type = other RNA
cacagagcaccagagtgccg

SEQ ID NO: 36473 - RNA, 20 nt, synthetic construct
  source 1..20: mol_type = other RNA
cacattggtaagttgggctg

SEQ ID NO: 36474 - RNA, 20 nt, synthetic construct
  source 1..20: mol_type = other RNA
caccagagtgccgtctgggt

SEQ ID NO: 36475 - RNA, 20 nt, synthetic construct
  source 1..20: mol_type = other RNA
cactctggtgctctgtgttc

SEQ ID NO: 36476 - RNA, 20 nt, synthetic construct
  source 1..20: mol_type = other RNA
cactgcatgtttggacttct

SEQ ID NO: 36477 - RNA, 20 nt, synthetic construct
  source 1..20: mol_type = other RNA
cacttttatttttcagattg

SEQ ID NO: 36478 - RNA, 20 nt, synthetic construct
  source 1..20: mol_type = other RNA
cagaagtccaaacatgcagt

SEQ ID NO: 36479 - RNA, 20 nt, synthetic construct
  source 1..20: mol_type = other RNA
cagaatggcagcacattggt

SEQ ID NO: 36480 - RNA, 20 nt, synthetic construct
  source 1..20: mol_type = other RNA
cagacccagacggcactctg

SEQ ID NO: 36481 - RNA, 20 nt, synthetic construct
  source 1..20: mol_type = other RNA
cagacggcactctggtgctc

SEQ ID NO: 36482 - RNA, 20 nt, synthetic construct
  source 1..20: mol_type = other RNA
cagagacttgcacaacatgc

SEQ ID NO: 36483 - RNA, 20 nt, synthetic construct
  source 1..20: mol_type = other RNA
cagagcaccagagtgccgtc

SEQ ID NO: 36484 - RNA, 20 nt, synthetic construct
  source 1..20: mol_type = other RNA
cagagtgccgtctgggtctg

SEQ ID NO: 36485 - RNA, 20 nt, synthetic construct
  source 1..20: mol_type = other RNA
cagattgaatatgaacacag

SEQ ID NO: 36486 - RNA, 20 nt, synthetic construct
  source 1..20: mol_type = other RNA
cagcacattggtaagttggg

SEQ ID NO: 36487 - RNA, 20 nt, synthetic construct
  source 1..20: mol_type = other RNA
cagcccaacttaccaatgtg

SEQ ID NO: 36488 - RNA, 20 nt, synthetic construct
  source 1..20: mol_type = other RNA
cagctgctaagctgtcctca

SEQ ID NO: 36489 - RNA, 20 nt, synthetic construct
  source 1..20: mol_type = other RNA
caggggtcactgcatgtttg

SEQ ID NO: 36490 - RNA, 20 nt, synthetic construct
  source 1..20: mol_type = other RNA
cagtgacccctgagaatgga

SEQ ID NO: 36491 - RNA, 20 nt, synthetic construct
  source 1..20: mol_type = other RNA
catgagcacagaagtccaaa

SEQ ID NO: 36492 - RNA, 20 nt, synthetic construct
  source 1..20: mol_type = other RNA
catgcagaatggcagcacat

SEQ ID NO: 36493 - RNA, 20 nt, synthetic construct
  source 1..20: mol_type = other RNA
catgcagtgacccctgagaa

SEQ ID NO: 36494 - RNA, 20 nt, synthetic construct
  source 1..20: mol_type = other RNA
catgcccacagagacttgca

SEQ ID NO: 36495 - RNA, 20 nt, synthetic construct
  source 1..20: mol_type = other RNA
catgttgtgcaagtctctgt

SEQ ID NO: 36496 - RNA, 20 nt, synthetic construct
  source 1..20: mol_type = other RNA
catgtttggacttctgtgct

SEQ ID NO: 36497 - RNA, 20 nt, synthetic construct
  source 1..20: mol_type = other RNA
cattcacacacacttttatt

SEQ ID NO: 36498 - RNA, 20 nt, synthetic construct
  source 1..20: mol_type = other RNA
cattctcaggggtcactgca

SEQ ID NO: 36499 - RNA, 20 nt, synthetic construct
  source 1..20: mol_type = other RNA
cattctgcatgttgtgcaag

SEQ ID NO: 36500 - RNA, 20 nt, synthetic construct
  source 1..20: mol_type = other RNA
cattggtaagttgggctgag

SEQ ID NO: 36501 - RNA, 20 nt, synthetic construct
  source 1..20: mol_type = other RNA
ccaaacatgcagtgacccct

SEQ ID NO: 36502 - RNA, 20 nt, synthetic construct
  source 1..20: mol_type = other RNA
ccaacttaccaatgtgctgc

SEQ ID NO: 36503 - RNA, 20 nt, synthetic construct
  source 1..20: mol_type = other RNA
ccaatgtgctgccattctgc

SEQ ID NO: 36504 - RNA, 20 nt, synthetic construct
  source 1..20: mol_type = other RNA
ccacagagacttgcacaaca

SEQ ID NO: 36505 - RNA, 20 nt, synthetic construct
  source 1..20: mol_type = other RNA
ccagacggcactctggtgct

SEQ ID NO: 36506 - RNA, 20 nt, synthetic construct
  source 1..20: mol_type = other RNA
ccagagtgccgtctgggtct

SEQ ID NO: 36507 - RNA, 20 nt, synthetic construct
  source 1..20: mol_type = other RNA
ccattctcaggggtcactgc

SEQ ID NO: 36508 - RNA, 20 nt, synthetic construct
  source 1..20: mol_type = other RNA
ccattctgcatgttgtgcaa

SEQ ID NO: 36509 - RNA, 20 nt, synthetic construct
  source 1..20: mol_type = other RNA
cccaacttaccaatgtgctg

SEQ ID NO: 36510 - RNA, 20 nt, synthetic construct
  source 1..20: mol_type = other RNA
cccacagagacttgcacaac

SEQ ID NO: 36511 - RNA, 20 nt, synthetic construct
  source 1..20: mol_type = other RNA
cccagacggcactctggtgc

SEQ ID NO: 36512 - RNA, 20 nt, synthetic construct
  source 1..20: mol_type = other RNA
cccctgagaatggacggcct

SEQ ID NO: 36513 - RNA, 20 nt, synthetic construct
  source 1..20: mol_type = other RNA
ccctgagaatggacggcctt

SEQ ID NO: 36514 - RNA, 20 nt, synthetic construct
  source 1..20: mol_type = other RNA
ccgtccattctcaggggtca

SEQ ID NO: 36515 - RNA, 20 nt, synthetic construct
  source 1..20: mol_type = other RNA
ccgtctgggtctgaaggaag

SEQ ID NO: 36516 - RNA, 20 nt, synthetic construct
  source 1..20: mol_type = other RNA
cctcagcccaacttaccaat

SEQ ID NO: 36517 - RNA, 20 nt, synthetic construct
  source 1..20: mol_type = other RNA
cctgagaatggacggccttc

SEQ ID NO: 36518 - RNA, 20 nt, synthetic construct
  source 1..20: mol_type = other RNA
ccttcagacccagacggcac

SEQ ID NO: 36519 - RNA, 20 nt, synthetic construct
  source 1..20: mol_type = other RNA
ccttccttcagacccagacg

SEQ ID NO: 36520 - RNA, 20 nt, synthetic construct
  source 1..20: mol_type = other RNA
cgcattcacacacactttta

SEQ ID NO: 36521 - RNA, 20 nt, synthetic construct
  source 1..20: mol_type = other RNA
cggcactctggtgctctgtg

SEQ ID NO: 36522 - RNA, 20 nt, synthetic construct
  source 1..20: mol_type = other RNA
cggccttccttcagacccag

SEQ ID NO: 36523 - RNA, 20 nt, synthetic construct
  source 1..20: mol_type = other RNA
cgtccattctcaggggtcac

SEQ ID NO: 36524 - RNA, 20 nt, synthetic construct
  source 1..20: mol_type = other RNA
cgtctgggtctgaaggaagg

SEQ ID NO: 36525 - RNA, 20 nt, synthetic construct
  source 1..20: mol_type = other RNA
ctaactactttcgcattcac

SEQ ID NO: 36526 - RNA, 20 nt, synthetic construct
  source 1..20: mol_type = other RNA
ctaagctgtcctcagcccaa

SEQ ID NO: 36527 - RNA, 20 nt, synthetic construct
  source 1..20: mol_type = other RNA
ctactttcgcattcacacac

SEQ ID NO: 36528 - RNA, 20 nt, synthetic construct
  source 1..20: mol_type = other RNA
ctcaacagctgctaagctgt

SEQ ID NO: 36529 - RNA, 20 nt, synthetic construct
  source 1..20: mol_type = other RNA
ctcagcccaacttaccaatg

SEQ ID NO: 36530 - RNA, 20 nt, synthetic construct
  source 1..20: mol_type = other RNA
ctcaggggtcactgcatgtt

SEQ ID NO: 36531 - RNA, 20 nt, synthetic construct
  source 1..20: mol_type = other RNA
ctcatgcccacagagacttg

SEQ ID NO: 36532 - RNA, 20 nt, synthetic construct
  source 1..20: mol_type = other RNA
ctctggtgctctgtgttcat

SEQ ID NO: 36533 - RNA, 20 nt, synthetic construct
  source 1..20: mol_type = other RNA
ctctgtgggcatgagcacag

SEQ ID NO: 36534 - RNA, 20 nt, synthetic construct
  source 1..20: mol_type = other RNA
ctctgtgttcatattcaatc

SEQ ID NO: 36535 - RNA, 20 nt, synthetic construct
  source 1..20: mol_type = other RNA
ctgaaaaataaaagtgtgtg

SEQ ID NO: 36536 - RNA, 20 nt, synthetic construct
  source 1..20: mol_type = other RNA
ctgaaggaaggccgtccatt

SEQ ID NO: 36537 - RNA, 20 nt, synthetic construct
  source 1..20: mol_type = other RNA
ctgagaatggacggccttcc

SEQ ID NO: 36538 - RNA, 20 nt, synthetic construct
  source 1..20: mol_type = other RNA
ctgaggacagcttagcagct

SEQ ID NO: 36539 - RNA, 20 nt, synthetic construct
  source 1..20: mol_type = other RNA
ctgcatgttgtgcaagtctc

SEQ ID NO: 36540 - RNA, 20 nt, synthetic construct
  source 1..20: mol_type = other RNA
ctgcatgtttggacttctgt

SEQ ID NO: 36541 - RNA, 20 nt, synthetic construct
  source 1..20: mol_type = other RNA
ctgccattctgcatgttgtg

SEQ ID NO: 36542 - RNA, 20 nt, synthetic construct
  source 1..20: mol_type = other RNA
ctgctaagctgtcctcagcc

SEQ ID NO: 36543 - RNA, 20 nt, synthetic construct
  source 1..20: mol_type = other RNA
ctgggtctgaaggaaggccg

SEQ ID NO: 36544 - RNA, 20 nt, synthetic construct
  source 1..20: mol_type = other RNA
ctggtgctctgtgttcatat

SEQ ID NO: 36545 - RNA, 20 nt, synthetic construct
  source 1..20: mol_type = other RNA
ctgtcctcagcccaacttac

SEQ ID NO: 36546 - RNA, 20 nt, synthetic construct
  source 1..20: mol_type = other RNA
ctgtgctcatgcccacagag

SEQ ID NO: 36547 - RNA, 20 nt, synthetic construct
  source 1..20: mol_type = other RNA
ctgtgggcatgagcacagaa

SEQ ID NO: 36548 - RNA, 20 nt, synthetic construct
  source 1..20: mol_type = other RNA
ctgtgttcatattcaatctg

SEQ ID NO: 36549 - RNA, 20 nt, synthetic construct
  source 1..20: mol_type = other RNA
cttaccaatgtgctgccatt

SEQ ID NO: 36550 - RNA, 20 nt, synthetic construct
  source 1..20: mol_type = other RNA
cttcagacccagacggcact

SEQ ID NO: 36551 - RNA, 20 nt, synthetic construct
  source 1..20: mol_type = other RNA
cttccttcagacccagacgg

SEQ ID NO: 36552 - RNA, 20 nt, synthetic construct
  source 1..20: mol_type = other RNA
cttctgtgctcatgcccaca

SEQ ID NO: 36553 - RNA, 20 nt, synthetic construct
  source 1..20: mol_type = other RNA
cttgcacaacatgcagaatg

SEQ ID NO: 36554 - RNA, 20 nt, synthetic construct
  source 1..20: mol_type = other RNA
ctttcgcattcacacacact

SEQ ID NO: 36555 - RNA, 20 nt, synthetic construct
  source 1..20: mol_type = other RNA
gaaaaataaaagtgtgtgtg

SEQ ID NO: 36556 - RNA, 20 nt, synthetic construct
  source 1..20: mol_type = other RNA
gaacacagagcaccagagtg

SEQ ID NO: 36557 - RNA, 20 nt, synthetic construct
  source 1..20: mol_type = other RNA
gaaggaaggccgtccattct

SEQ ID NO: 36558 - RNA, 20 nt, synthetic construct
  source 1..20: mol_type = other RNA
gaaggccgtccattctcagg

SEQ ID NO: 36559 - RNA, 20 nt, synthetic construct
  source 1..20: mol_type = other RNA
gaagtccaaacatgcagtga

SEQ ID NO: 36560 - RNA, 20 nt, synthetic construct
  source 1..20: mol_type = other RNA
gaatatgaacacagagcacc

SEQ ID NO: 36561 - RNA, 20 nt, synthetic construct
  source 1..20: mol_type = other RNA
gaatggacggccttccttca

SEQ ID NO: 36562 - RNA, 20 nt, synthetic construct
  source 1..20: mol_type = other RNA
gaatggcagcacattggtaa

SEQ ID NO: 36563 - RNA, 20 nt, synthetic construct
  source 1..20: mol_type = other RNA
gacccagacggcactctggt

SEQ ID NO: 36564 - RNA, 20 nt, synthetic construct
  source 1..20: mol_type = other RNA
gacccctgagaatggacggc

SEQ ID NO: 36565 - RNA, 20 nt, synthetic construct
  source 1..20: mol_type = other RNA
gacggcactctggtgctctg

SEQ ID NO: 36566 - RNA, 20 nt, synthetic construct
  source 1..20: mol_type = other RNA
gacggccttccttcagaccc

SEQ ID NO: 36567 - RNA, 20 nt, synthetic construct
  source 1..20: mol_type = other RNA
gactcaacagctgctaagct

SEQ ID NO: 36568 - RNA, 20 nt, synthetic construct
  source 1..20: mol_type = other RNA
gacttctgtgctcatgccca

SEQ ID NO: 36569 - RNA, 20 nt, synthetic construct
  source 1..20: mol_type = other RNA
gacttgcacaacatgcagaa

SEQ ID NO: 36570 - RNA, 20 nt, synthetic construct
  source 1..20: mol_type = other RNA
gagaatggacggccttcctt

SEQ ID NO: 36571 - RNA, 20 nt, synthetic construct
  source 1..20: mol_type = other RNA
gagacttgcacaacatgcag

SEQ ID NO: 36572 - RNA, 20 nt, synthetic construct
  source 1..20: mol_type = other RNA
gagcacagaagtccaaacat

SEQ ID NO: 36573 - RNA, 20 nt, synthetic construct
  source 1..20: mol_type = other RNA
gagcaccagagtgccgtctg

SEQ ID NO: 36574 - RNA, 20 nt, synthetic construct
  source 1..20: mol_type = other RNA
gagtgccgtctgggtctgaa

SEQ ID NO: 36575 - RNA, 20 nt, synthetic construct
  source 1..20: mol_type = other RNA
gattgaatatgaacacagag

SEQ ID NO: 36576 - RNA, 20 nt, synthetic construct
  source 1..20: mol_type = other RNA
gcaagtctctgtgggcatga

SEQ ID NO: 36577 - RNA, 20 nt, synthetic construct
  source 1..20: mol_type = other RNA
gcacaacatgcagaatggca

SEQ ID NO: 36578 - RNA, 20 nt, synthetic construct
  source 1..20: mol_type = other RNA
gcacagaagtccaaacatgc

SEQ ID NO: 36579 - RNA, 20 nt, synthetic construct
  source 1..20: mol_type = other RNA
gcacattggtaagttgggct

SEQ ID NO: 36580 - RNA, 20 nt, synthetic construct
  source 1..20: mol_type = other RNA
gcaccagagtgccgtctggg

SEQ ID NO: 36581 - RNA, 20 nt, synthetic construct
  source 1..20: mol_type = other RNA
gcactctggtgctctgtgtt

SEQ ID NO: 36582 - RNA, 20 nt, synthetic construct
  source 1..20: mol_type = other RNA
gcagaatggcagcacattgg

SEQ ID NO: 36583 - RNA, 20 nt, synthetic construct
  source 1..20: mol_type = other RNA
gcagcacattggtaagttgg

SEQ ID NO: 36584 - RNA, 20 nt, synthetic construct
  source 1..20: mol_type = other RNA
gcagtgacccctgagaatgg

SEQ ID NO: 36585 - RNA, 20 nt, synthetic construct
  source 1..20: mol_type = other RNA
gcatgagcacagaagtccaa

SEQ ID NO: 36586 - RNA, 20 nt, synthetic construct
  source 1..20: mol_type = other RNA
gcatgttgtgcaagtctctg

SEQ ID NO: 36587 - RNA, 20 nt, synthetic construct
  source 1..20: mol_type = other RNA
gcatgtttggacttctgtgc

SEQ ID NO: 36588 - RNA, 20 nt, synthetic construct
  source 1..20: mol_type = other RNA
gcattcacacacacttttat

SEQ ID NO: 36589 - RNA, 20 nt, synthetic construct
  source 1..20: mol_type = other RNA
gccattctgcatgttgtgca

SEQ ID NO: 36590 - RNA, 20 nt, synthetic construct
  source 1..20: mol_type = other RNA
gcccaacttaccaatgtgct

SEQ ID NO: 36591 - RNA, 20 nt, synthetic construct
  source 1..20: mol_type = other RNA
gcccacagagacttgcacaa

SEQ ID NO: 36592 - RNA, 20 nt, synthetic construct
  source 1..20: mol_type = other RNA
gccgtccattctcaggggtc

SEQ ID NO: 36593 - RNA, 20 nt, synthetic construct
  source 1..20: mol_type = other RNA
gccgtctgggtctgaaggaa

SEQ ID NO: 36594 - RNA, 20 nt, synthetic construct
  source 1..20: mol_type = other RNA
gccttccttcagacccagac

SEQ ID NO: 36595 - RNA, 20 nt, synthetic construct
  source 1..20: mol_type = other RNA
gctaagctgtcctcagccca

SEQ ID NO: 36596 - RNA, 20 nt, synthetic construct
  source 1..20: mol_type = other RNA
gctcatgcccacagagactt

SEQ ID NO: 36597 - RNA, 20 nt, synthetic construct
  source 1..20: mol_type = other RNA
gctctgtgttcatattcaat

SEQ ID NO: 36598 - RNA, 20 nt, synthetic construct
  source 1..20: mol_type = other RNA
gctgaggacagcttagcagc

SEQ ID NO: 36599 - RNA, 20 nt, synthetic construct
  source 1..20: mol_type = other RNA
gctgccattctgcatgttgt

SEQ ID NO: 36600 - RNA, 20 nt, synthetic construct
  source 1..20: mol_type = other RNA
gctgctaagctgtcctcagc

SEQ ID NO: 36601 - RNA, 20 nt, synthetic construct
  source 1..20: mol_type = other RNA
gctgtcctcagcccaactta

SEQ ID NO: 36602 - RNA, 20 nt, synthetic construct
  source 1..20: mol_type = other RNA
ggaaggccgtccattctcag

SEQ ID NO: 36603 - RNA, 20 nt, synthetic construct
  source 1..20: mol_type = other RNA
ggacggccttccttcagacc

SEQ ID NO: 36604 - RNA, 20 nt, synthetic construct
  source 1..20: mol_type = other RNA
ggacttctgtgctcatgccc

SEQ ID NO: 36605 - RNA, 20 nt, synthetic construct
  source 1..20: mol_type = other RNA
ggcactctggtgctctgtgt

SEQ ID NO: 36606 - RNA, 20 nt, synthetic construct
  source 1..20: mol_type = other RNA
ggcagcacattggtaagttg

SEQ ID NO: 36607 - RNA, 20 nt, synthetic construct
  source 1..20: mol_type = other RNA
ggcatgagcacagaagtcca

SEQ ID NO: 36608 - RNA, 20 nt, synthetic construct
  source 1..20: mol_type = other RNA
ggccgtccattctcaggggt

SEQ ID NO: 36609 - RNA, 20 nt, synthetic construct
  source 1..20: mol_type = other RNA
ggccttccttcagacccaga

SEQ ID NO: 36610 - RNA, 20 nt, synthetic construct
  source 1..20: mol_type = other RNA
ggctgaggacagcttagcag

SEQ ID NO: 36611 - RNA, 20 nt, synthetic construct
  source 1..20: mol_type = other RNA
gggcatgagcacagaagtcc

SEQ ID NO: 36612 - RNA, 20 nt, synthetic construct
  source 1..20: mol_type = other RNA
gggctgaggacagcttagca

SEQ ID NO: 36613 - RNA, 20 nt, synthetic construct
  source 1..20: mol_type = other RNA
ggggtcactgcatgtttgga

SEQ ID NO: 36614 - RNA, 20 nt, synthetic construct
  source 1..20: mol_type = other RNA
gggtcactgcatgtttggac

SEQ ID NO: 36615 - RNA, 20 nt, synthetic construct
  source 1..20: mol_type = other RNA
gggtctgaaggaaggccgtc

SEQ ID NO: 36616 - RNA, 20 nt, synthetic construct
  source 1..20: mol_type = other RNA
ggtaagttgggctgaggaca

SEQ ID NO: 36617 - RNA, 20 nt, synthetic construct
  source 1..20: mol_type = other RNA
ggtcactgcatgtttggact

SEQ ID NO: 36618 - RNA, 20 nt, synthetic construct
  source 1..20: mol_type = other RNA
ggtctgaaggaaggccgtcc

SEQ ID NO: 36619 - RNA, 20 nt, synthetic construct
  source 1..20: mol_type = other RNA
ggtgctctgtgttcatattc

SEQ ID NO: 36620 - RNA, 20 nt, synthetic construct
  source 1..20: mol_type = other RNA
gtaagttgggctgaggacag

SEQ ID NO: 36621 - RNA, 20 nt, synthetic construct
  source 1..20: mol_type = other RNA
gtcactgcatgtttggactt

SEQ ID NO: 36622 - RNA, 20 nt, synthetic construct
  source 1..20: mol_type = other RNA
gtccaaacatgcagtgaccc

SEQ ID NO: 36623 - RNA, 20 nt, synthetic construct
  source 1..20: mol_type = other RNA
gtccattctcaggggtcact

SEQ ID NO: 36624 - RNA, 20 nt, synthetic construct
  source 1..20: mol_type = other RNA
gtcctcagcccaacttacca

SEQ ID NO: 36625 - RNA, 20 nt, synthetic construct
  source 1..20: mol_type = other RNA
gtctctgtgggcatgagcac

SEQ ID NO: 36626 - RNA, 20 nt, synthetic construct
  source 1..20: mol_type = other RNA
gtctgaaggaaggccgtcca

SEQ ID NO: 36627 - RNA, 20 nt, synthetic construct
  source 1..20: mol_type = other RNA
gtctgggtctgaaggaaggc

SEQ ID NO: 36628 - RNA, 20 nt, synthetic construct
  source 1..20: mol_type = other RNA
gtgacccctgagaatggacg

SEQ ID NO: 36629 - RNA, 20 nt, synthetic construct
  source 1..20: mol_type = other RNA
gtgcaagtctctgtgggcat

SEQ ID NO: 36630 - RNA, 20 nt, synthetic construct
  source 1..20: mol_type = other RNA
gtgccgtctgggtctgaagg

SEQ ID NO: 36631 - RNA, 20 nt, synthetic construct
  source 1..20: mol_type = other RNA
gtgctcatgcccacagagac

SEQ ID NO: 36632 - RNA, 20 nt, synthetic construct
  source 1..20: mol_type = other RNA
gtgctctgtgttcatattca

SEQ ID NO: 36633 - RNA, 20 nt, synthetic construct
  source 1..20: mol_type = other RNA
gtgctgccattctgcatgtt

SEQ ID NO: 36634 - RNA, 20 nt, synthetic construct
  source 1..20: mol_type = other RNA
gtgggcatgagcacagaagt

SEQ ID NO: 36635 - RNA, 20 nt, synthetic construct
  source 1..20: mol_type = other RNA
gtgttcatattcaatctgaa

SEQ ID NO: 36636 - RNA, 20 nt, synthetic construct
  source 1..20: mol_type = other RNA
gttcatattcaatctgaaaa

SEQ ID NO: 36637 - RNA, 20 nt, synthetic construct
  source 1..20: mol_type = other RNA
gttgggctgaggacagctta

SEQ ID NO: 36638 - RNA, 20 nt, synthetic construct
  source 1..20: mol_type = other RNA
gttgtgcaagtctctgtggg

SEQ ID NO: 36639 - RNA, 20 nt, synthetic construct
  source 1..20: mol_type = other RNA
gtttggacttctgtgctcat

SEQ ID NO: 36640 - RNA, 20 nt, synthetic construct
  source 1..20: mol_type = other RNA
taaaagtgtgtgtgaatgcg

SEQ ID NO: 36641 - RNA, 20 nt, synthetic construct
  source 1..20: mol_type = other RNA
taactactttcgcattcaca

SEQ ID NO: 36642 - RNA, 20 nt, synthetic construct
  source 1..20: mol_type = other RNA
taagctgtcctcagcccaac

SEQ ID NO: 36643 - RNA, 20 nt, synthetic construct
  source 1..20: mol_type = other RNA
taagttgggctgaggacagc

SEQ ID NO: 36644 - RNA, 20 nt, synthetic construct
  source 1..20: mol_type = other RNA
taccaatgtgctgccattct

SEQ ID NO: 36645 - RNA, 20 nt, synthetic construct
  source 1..20: mol_type = other RNA
tactttcgcattcacacaca

SEQ ID NO: 36646 - RNA, 20 nt, synthetic construct
  source 1..20: mol_type = other RNA
tatgaacacagagcaccaga

SEQ ID NO: 36647 - RNA, 20 nt, synthetic construct
  source 1..20: mol_type = other RNA
tcaacagctgctaagctgtc

SEQ ID NO: 36648 - RNA, 20 nt, synthetic construct
  source 1..20: mol_type = other RNA
tcacacacacttttattttt

SEQ ID NO: 36649 - RNA, 20 nt, synthetic construct
  source 1..20: mol_type = other RNA
tcactgcatgtttggacttc

SEQ ID NO: 36650 - RNA, 20 nt, synthetic construct
  source 1..20: mol_type = other RNA
tcagacccagacggcactct

SEQ ID NO: 36651 - RNA, 20 nt, synthetic construct
  source 1..20: mol_type = other RNA
tcagattgaatatgaacaca

SEQ ID NO: 36652 - RNA, 20 nt, synthetic construct
  source 1..20: mol_type = other RNA
tcagcccaacttaccaatgt

SEQ ID NO: 36653 - RNA, 20 nt, synthetic construct
  source 1..20: mol_type = other RNA
tcaggggtcactgcatgttt

SEQ ID NO: 36654 - RNA, 20 nt, synthetic construct
  source 1..20: mol_type = other RNA
tcatgcccacagagacttgc

SEQ ID NO: 36655 - RNA, 20 nt, synthetic construct
  source 1..20: mol_type = other RNA
tccaaacatgcagtgacccc

SEQ ID NO: 36656 - RNA, 20 nt, synthetic construct
  source 1..20: mol_type = other RNA
tccattctcaggggtcactg

SEQ ID NO: 36657 - RNA, 20 nt, synthetic construct
  source 1..20: mol_type = other RNA
tcctcagcccaacttaccaa

SEQ ID NO: 36658 - RNA, 20 nt, synthetic construct
  source 1..20: mol_type = other RNA
tccttcagacccagacggca

SEQ ID NO: 36659 - RNA, 20 nt, synthetic construct
  source 1..20: mol_type = other RNA
tcgcattcacacacactttt

SEQ ID NO: 36660 - RNA, 20 nt, synthetic construct
  source 1..20: mol_type = other RNA
tctcaggggtcactgcatgt

SEQ ID NO: 36661 - RNA, 20 nt, synthetic construct
  source 1..20: mol_type = other RNA
tctctgtgggcatgagcaca

SEQ ID NO: 36662 - RNA, 20 nt, synthetic construct
  source 1..20: mol_type = other RNA
tctgaaaaataaaagtgtgt

SEQ ID NO: 36663 - RNA, 20 nt, synthetic construct
  source 1..20: mol_type = other RNA
tctgaaggaaggccgtccat

SEQ ID NO: 36664 - RNA, 20 nt, synthetic construct
  source 1..20: mol_type = other RNA
tctgcatgttgtgcaagtct

SEQ ID NO: 36665 - RNA, 20 nt, synthetic construct
  source 1..20: mol_type = other RNA
tctgggtctgaaggaaggcc

SEQ ID NO: 36666 - RNA, 20 nt, synthetic construct
  source 1..20: mol_type = other RNA
tctggtgctctgtgttcata

SEQ ID NO: 36667 - RNA, 20 nt, synthetic construct
  source 1..20: mol_type = other RNA
tctgtgctcatgcccacaga

SEQ ID NO: 36668 - RNA, 20 nt, synthetic construct
  source 1..20: mol_type = other RNA
tctgtgggcatgagcacaga

SEQ ID NO: 36669 - RNA, 20 nt, synthetic construct
  source 1..20: mol_type = other RNA
tctgtgttcatattcaatct

SEQ ID NO: 36670 - RNA, 20 nt, synthetic construct
  source 1..20: mol_type = other RNA
tgaaaaataaaagtgtgtgt

SEQ ID NO: 36671 - RNA, 20 nt, synthetic construct
  source 1..20: mol_type = other RNA
tgaacacagagcaccagagt

SEQ ID NO: 36672 - RNA, 20 nt, synthetic construct
  source 1..20: mol_type = other RNA
tgaaggaaggccgtccattc

SEQ ID NO: 36673 - RNA, 20 nt, synthetic construct
  source 1..20: mol_type = other RNA
tgaatatgaacacagagcac

SEQ ID NO: 36674 - RNA, 20 nt, synthetic construct
  source 1..20: mol_type = other RNA
tgacccctgagaatggacgg

SEQ ID NO: 36675 - RNA, 20 nt, synthetic construct
  source 1..20: mol_type = other RNA
tgagaatggacggccttcct

SEQ ID NO: 36676 - RNA, 20 nt, synthetic construct
  source 1..20: mol_type = other RNA
tgagcacagaagtccaaaca

SEQ ID NO: 36677 - RNA, 20 nt, synthetic construct
  source 1..20: mol_type = other RNA
tgcaagtctctgtgggcatg

SEQ ID NO: 36678 - RNA, 20 nt, synthetic construct
  source 1..20: mol_type = other RNA
tgcacaacatgcagaatggc

SEQ ID NO: 36679 - RNA, 20 nt, synthetic construct
  source 1..20: mol_type = other RNA
tgcagaatggcagcacattg

SEQ ID NO: 36680 - RNA, 20 nt, synthetic construct
  source 1..20: mol_type = other RNA
tgcagtgacccctgagaatg

SEQ ID NO: 36681 - RNA, 20 nt, synthetic construct
  source 1..20: mol_type = other RNA
tgcatgttgtgcaagtctct

SEQ ID NO: 36682 - RNA, 20 nt, synthetic construct
  source 1..20: mol_type = other RNA
tgcatgtttggacttctgtg

SEQ ID NO: 36683 - RNA, 20 nt, synthetic construct
  source 1..20: mol_type = other RNA
tgccattctgcatgttgtgc

SEQ ID NO: 36684 - RNA, 20 nt, synthetic construct
  source 1..20: mol_type = other RNA
tgcccacagagacttgcaca

SEQ ID NO: 36685 - RNA, 20 nt, synthetic construct
  source 1..20: mol_type = other RNA
tgccgtctgggtctgaagga

SEQ ID NO: 36686 - RNA, 20 nt, synthetic construct
  source 1..20: mol_type = other RNA
tgctaagctgtcctcagccc

SEQ ID NO: 36687 - RNA, 20 nt, synthetic construct
  source 1..20: mol_type = other RNA
tgctcatgcccacagagact

SEQ ID NO: 36688 - RNA, 20 nt, synthetic construct
  source 1..20: mol_type = other RNA
tgctctgtgttcatattcaa

SEQ ID NO: 36689 - RNA, 20 nt, synthetic construct
  source 1..20: mol_type = other RNA
tgctgccattctgcatgttg

SEQ ID NO: 36690 - RNA, 20 nt, synthetic construct
  source 1..20: mol_type = other RNA
tggacggccttccttcagac

SEQ ID NO: 36691 - RNA, 20 nt, synthetic construct
  source 1..20: mol_type = other RNA
tggacttctgtgctcatgcc

SEQ ID NO: 36692 - RNA, 20 nt, synthetic construct
  source 1..20: mol_type = other RNA
tggcagcacattggtaagtt

SEQ ID NO: 36693 - RNA, 20 nt, synthetic construct
  source 1..20: mol_type = other RNA
tgggcatgagcacagaagtc

SEQ ID NO: 36694 - RNA, 20 nt, synthetic construct
  source 1..20: mol_type = other RNA
tgggctgaggacagcttagc

SEQ ID NO: 36695 - RNA, 20 nt, synthetic construct
  source 1..20: mol_type = other RNA
tgggtctgaaggaaggccgt

SEQ ID NO: 36696 - RNA, 20 nt, synthetic construct
  source 1..20: mol_type = other RNA
tggtaagttgggctgaggac

SEQ ID NO: 36697 - RNA, 20 nt, synthetic construct
  source 1..20: mol_type = other RNA
tggtgctctgtgttcatatt

SEQ ID NO: 36698 - RNA, 20 nt, synthetic construct
  source 1..20: mol_type = other RNA
tgtcctcagcccaacttacc

SEQ ID NO: 36699 - RNA, 20 nt, synthetic construct
  source 1..20: mol_type = other RNA
tgtgcaagtctctgtgggca

SEQ ID NO: 36700 - RNA, 20 nt, synthetic construct
  source 1..20: mol_type = other RNA
tgtgctcatgcccacagaga

SEQ ID NO: 36701 - RNA, 20 nt, synthetic construct
  source 1..20: mol_type = other RNA
tgtgctgccattctgcatgt

SEQ ID NO: 36702 - RNA, 20 nt, synthetic construct
  source 1..20: mol_type = other RNA
tgtgggcatgagcacagaag

SEQ ID NO: 36703 - RNA, 20 nt, synthetic construct
  source 1..20: mol_type = other RNA
tgtgttcatattcaatctga

SEQ ID NO: 36704 - RNA, 20 nt, synthetic construct
  source 1..20: mol_type = other RNA
tgttcatattcaatctgaaa

SEQ ID NO: 36705 - RNA, 20 nt, synthetic construct
  source 1..20: mol_type = other RNA
tgttgtgcaagtctctgtgg

SEQ ID NO: 36706 - RNA, 20 nt, synthetic construct
  source 1..20: mol_type = other RNA
tgtttggacttctgtgctca

SEQ ID NO: 36707 - RNA, 20 nt, synthetic construct
  source 1..20: mol_type = other RNA
ttaccaatgtgctgccattc

SEQ ID NO: 36708 - RNA, 20 nt, synthetic construct
  source 1..20: mol_type = other RNA
ttcacacacacttttatttt

SEQ ID NO: 36709 - RNA, 20 nt, synthetic construct
  source 1..20: mol_type = other RNA
ttcagacccagacggcactc

SEQ ID NO: 36710 - RNA, 20 nt, synthetic construct
  source 1..20: mol_type = other RNA
ttcagattgaatatgaacac

SEQ ID NO: 36711 - RNA, 20 nt, synthetic construct
  source 1..20: mol_type = other RNA
ttccttcagacccagacggc

SEQ ID NO: 36712 - RNA, 20 nt, synthetic construct
  source 1..20: mol_type = other RNA
ttcgcattcacacacacttt

SEQ ID NO: 36713 - RNA, 20 nt, synthetic construct
  source 1..20: mol_type = other RNA
ttctcaggggtcactgcatg

SEQ ID NO: 36714 - RNA, 20 nt, synthetic construct
  source 1..20: mol_type = other RNA
ttctgcatgttgtgcaagtc

SEQ ID NO: 36715 - RNA, 20 nt, synthetic construct
  source 1..20: mol_type = other RNA
ttctgtgctcatgcccacag

SEQ ID NO: 36716 - RNA, 20 nt, synthetic construct
  source 1..20: mol_type = other RNA
ttgaatatgaacacagagca

SEQ ID NO: 36717 - RNA, 20 nt, synthetic construct
  source 1..20: mol_type = other RNA
ttgcacaacatgcagaatgg

SEQ ID NO: 36718 - RNA, 20 nt, synthetic construct
  source 1..20: mol_type = other RNA
ttggacttctgtgctcatgc

SEQ ID NO: 36719 - RNA, 20 nt, synthetic construct
  source 1..20: mol_type = other RNA
ttgggctgaggacagcttag

SEQ ID NO: 36720 - RNA, 20 nt, synthetic construct
  source 1..20: mol_type = other RNA
ttggtaagttgggctgagga

SEQ ID NO: 36721 - RNA, 20 nt, synthetic construct
  source 1..20: mol_type = other RNA
ttgtgcaagtctctgtgggc

SEQ ID NO: 36722 - RNA, 20 nt, synthetic construct
  source 1..20: mol_type = other RNA
tttcagattgaatatgaaca

SEQ ID NO: 36723 - RNA, 20 nt, synthetic construct
  source 1..20: mol_type = other RNA
tttcgcattcacacacactt

SEQ ID NO: 36724 - RNA, 20 nt, synthetic construct
  source 1..20: mol_type = other RNA
tttggacttctgtgctcatg

SEQ ID NO: 36725 - RNA, 20 nt, synthetic construct
  source 1..20: mol_type = other RNA
ttttcagattgaatatgaac

SEQ ID NO: 36726 - RNA, 21 nt, synthetic construct
  source 1..21: mol_type = other RNA
aaaagtgtgtgtgaatgcgaa

SEQ ID NO: 36727 - RNA, 21 nt, synthetic construct
  source 1..21: mol_type = other RNA
aaacatgcagtgacccctgag

SEQ ID NO: 36728 - RNA, 21 nt, synthetic construct
  source 1..21: mol_type = other RNA
aaagtgtgtgtgaatgcgaaa

SEQ ID NO: 36729 - RNA, 21 nt, synthetic construct
  source 1..21: mol_type = other RNA
aaataaaagtgtgtgtgaatg

SEQ ID NO: 36730 - RNA, 21 nt, synthetic construct
  source 1..21: mol_type = other RNA
aacacagagcaccagagtgcc

SEQ ID NO: 36731 - RNA, 21 nt, synthetic construct
  source 1..21: mol_type = other RNA
aacagctgctaagctgtcctc

SEQ ID NO: 36732 - RNA, 21 nt, synthetic construct
  source 1..21: mol_type = other RNA
aacatgcagaatggcagcaca

SEQ ID NO: 36733 - RNA, 21 nt, synthetic construct
  source 1..21: mol_type = other RNA
aacatgcagtgacccctgaga

SEQ ID NO: 36734 - RNA, 21 nt, synthetic construct
  source 1..21: mol_type = other RNA
aactactttcgcattcacaca

SEQ ID NO: 36735 - RNA, 21 nt, synthetic construct
  source 1..21: mol_type = other RNA
aacttaccaatgtgctgccat

SEQ ID NO: 36736 - RNA, 21 nt, synthetic construct
  source 1..21: mol_type = other RNA
aagctgtcctcagcccaactt

SEQ ID NO: 36737 - RNA, 21 nt, synthetic construct
  source 1..21: mol_type = other RNA
aaggaaggccgtccattctca

SEQ ID NO: 36738 - RNA, 21 nt, synthetic construct
  source 1..21: mol_type = other RNA
aaggccgtccattctcagggg

SEQ ID NO: 36739 - RNA, 21 nt, synthetic construct
  source 1..21: mol_type = other RNA
aagtccaaacatgcagtgacc

SEQ ID NO: 36740 - RNA, 21 nt, synthetic construct
  source 1..21: mol_type = other RNA
aagtctctgtgggcatgagca

SEQ ID NO: 36741 - RNA, 21 nt, synthetic construct
  source 1..21: mol_type = other RNA
aagttgggctgaggacagctt

SEQ ID NO: 36742 - RNA, 21 nt, synthetic construct
  source 1..21: mol_type = other RNA
aataaaagtgtgtgtgaatgc

SEQ ID NO: 36743 - RNA, 21 nt, synthetic construct
  source 1..21: mol_type = other RNA
aatatgaacacagagcaccag

SEQ ID NO: 36744 - RNA, 21 nt, synthetic construct
  source 1..21: mol_type = other RNA
aatggacggccttccttcaga

SEQ ID NO: 36745 - RNA, 21 nt, synthetic construct
  source 1..21: mol_type = other RNA
aatggcagcacattggtaagt

SEQ ID NO: 36746 - RNA, 21 nt, synthetic construct
  source 1..21: mol_type = other RNA
aatgtgctgccattctgcatg

SEQ ID NO: 36747 - RNA, 21 nt, synthetic construct
  source 1..21: mol_type = other RNA
acaacatgcagaatggcagca

SEQ ID NO: 36748 - RNA, 21 nt, synthetic construct
  source 1..21: mol_type = other RNA
acacacacttttatttttcag

SEQ ID NO: 36749 - RNA, 21 nt, synthetic construct
  source 1..21: mol_type = other RNA
acacagagcaccagagtgccg

SEQ ID NO: 36750 - RNA, 21 nt, synthetic construct
  source 1..21: mol_type = other RNA
acagaagtccaaacatgcagt

SEQ ID NO: 36751 - RNA, 21 nt, synthetic construct
  source 1..21: mol_type = other RNA
acagagacttgcacaacatgc

SEQ ID NO: 36752 - RNA, 21 nt, synthetic construct
  source 1..21: mol_type = other RNA
acagagcaccagagtgccgtc

SEQ ID NO: 36753 - RNA, 21 nt, synthetic construct
  source 1..21: mol_type = other RNA
acagctgctaagctgtcctca

SEQ ID NO: 36754 - RNA, 21 nt, synthetic construct
  source 1..21: mol_type = other RNA
acatgcagaatggcagcacat

SEQ ID NO: 36755 - RNA, 21 nt, synthetic construct
  source 1..21: mol_type = other RNA
acatgcagtgacccctgagaa

SEQ ID NO: 36756 - RNA, 21 nt, synthetic construct
  source 1..21: mol_type = other RNA
acattggtaagttgggctgag

SEQ ID NO: 36757 - RNA, 21 nt, synthetic construct
  source 1..21: mol_type = other RNA
accaatgtgctgccattctgc

SEQ ID NO: 36758 - RNA, 21 nt, synthetic construct
  source 1..21: mol_type = other RNA
accagagtgccgtctgggtct

SEQ ID NO: 36759 - RNA, 21 nt, synthetic construct
  source 1..21: mol_type = other RNA
acccagacggcactctggtgc

SEQ ID NO: 36760 - RNA, 21 nt, synthetic construct
  source 1..21: mol_type = other RNA
acccctgagaatggacggcct

SEQ ID NO: 36761 - RNA, 21 nt, synthetic construct
  source 1..21: mol_type = other RNA
acggcactctggtgctctgtg

SEQ ID NO: 36762 - RNA, 21 nt, synthetic construct
  source 1..21: mol_type = other RNA
acggccttccttcagacccag

SEQ ID NO: 36763 - RNA, 21 nt, synthetic construct
  source 1..21: mol_type = other RNA
actactttcgcattcacacac

SEQ ID NO: 36764 - RNA, 21 nt, synthetic construct
  source 1..21: mol_type = other RNA
actcaacagctgctaagctgt

SEQ ID NO: 36765 - RNA, 21 nt, synthetic construct
  source 1..21: mol_type = other RNA
actctggtgctctgtgttcat

SEQ ID NO: 36766 - RNA, 21 nt, synthetic construct
  source 1..21: mol_type = other RNA
actgcatgtttggacttctgt

SEQ ID NO: 36767 - RNA, 21 nt, synthetic construct
  source 1..21: mol_type = other RNA
acttaccaatgtgctgccatt

SEQ ID NO: 36768 - RNA, 21 nt, synthetic construct
  source 1..21: mol_type = other RNA
acttctgtgctcatgcccaca

SEQ ID NO: 36769 - RNA, 21 nt, synthetic construct
  source 1..21: mol_type = other RNA
acttgcacaacatgcagaatg

SEQ ID NO: 36770 - RNA, 21 nt, synthetic construct
  source 1..21: mol_type = other RNA
actttcgcattcacacacact

SEQ ID NO: 36771 - RNA, 21 nt, synthetic construct
  source 1..21: mol_type = other RNA
agaagtccaaacatgcagtga

SEQ ID NO: 36772 - RNA, 21 nt, synthetic construct
  source 1..21: mol_type = other RNA
agaatggacggccttccttca

SEQ ID NO: 36773 - RNA, 21 nt, synthetic construct
  source 1..21: mol_type = other RNA
agaatggcagcacattggtaa

SEQ ID NO: 36774 - RNA, 21 nt, synthetic construct
  source 1..21: mol_type = other RNA
agacccagacggcactctggt

SEQ ID NO: 36775 - RNA, 21 nt, synthetic construct
  source 1..21: mol_type = other RNA
agacggcactctggtgctctg

SEQ ID NO: 36776 - RNA, 21 nt, synthetic construct
  source 1..21: mol_type = other RNA
agacttgcacaacatgcagaa

SEQ ID NO: 36777 - RNA, 21 nt, synthetic construct
  source 1..21: mol_type = other RNA
agagacttgcacaacatgcag

SEQ ID NO: 36778 - RNA, 21 nt, synthetic construct
  source 1..21: mol_type = other RNA
agagcaccagagtgccgtctg

SEQ ID NO: 36779 - RNA, 21 nt, synthetic construct
  source 1..21: mol_type = other RNA
agagtgccgtctgggtctgaa

SEQ ID NO: 36780 - RNA, 21 nt, synthetic construct
  source 1..21: mol_type = other RNA
agattgaatatgaacacagag

SEQ ID NO: 36781 - RNA, 21 nt, synthetic construct
  source 1..21: mol_type = other RNA
agcacagaagtccaaacatgc

SEQ ID NO: 36782 - RNA, 21 nt, synthetic construct
  source 1..21: mol_type = other RNA
agcacattggtaagttgggct

SEQ ID NO: 36783 - RNA, 21 nt, synthetic construct
  source 1..21: mol_type = other RNA
agcaccagagtgccgtctggg

SEQ ID NO: 36784 - RNA, 21 nt, synthetic construct
  source 1..21: mol_type = other RNA
agcccaacttaccaatgtgct

SEQ ID NO: 36785 - RNA, 21 nt, synthetic construct
  source 1..21: mol_type = other RNA
agctgctaagctgtcctcagc

SEQ ID NO: 36786 - RNA, 21 nt, synthetic construct
  source 1..21: mol_type = other RNA
agctgtcctcagcccaactta

SEQ ID NO: 36787 - RNA, 21 nt, synthetic construct
  source 1..21: mol_type = other RNA
aggaaggccgtccattctcag

SEQ ID NO: 36788 - RNA, 21 nt, synthetic construct
  source 1..21: mol_type = other RNA
aggccgtccattctcaggggt

SEQ ID NO: 36789 - RNA, 21 nt, synthetic construct
  source 1..21: mol_type = other RNA
aggggtcactgcatgtttgga

SEQ ID NO: 36790 - RNA, 21 nt, synthetic construct
  source 1..21: mol_type = other RNA
agtccaaacatgcagtgaccc

SEQ ID NO: 36791 - RNA, 21 nt, synthetic construct
  source 1..21: mol_type = other RNA
agtctctgtgggcatgagcac

SEQ ID NO: 36792 - RNA, 21 nt, synthetic construct
  source 1..21: mol_type = other RNA
agtgacccctgagaatggacg

SEQ ID NO: 36793 - RNA, 21 nt, synthetic construct
  source 1..21: mol_type = other RNA
agtgccgtctgggtctgaagg

SEQ ID NO: 36794 - RNA, 21 nt, synthetic construct
  source 1..21: mol_type = other RNA
agttgggctgaggacagctta

SEQ ID NO: 36795 - RNA, 21 nt, synthetic construct
  source 1..21: mol_type = other RNA
ataaaagtgtgtgtgaatgcg

SEQ ID NO: 36796 - RNA, 21 nt, synthetic construct
  source 1..21: mol_type = other RNA
atatgaacacagagcaccaga

SEQ ID NO: 36797 - RNA, 21 nt, synthetic construct
  source 1..21: mol_type = other RNA
atgaacacagagcaccagagt

SEQ ID NO: 36798 - RNA, 21 nt, synthetic construct
  source 1..21: mol_type = other RNA
atgagcacagaagtccaaaca

SEQ ID NO: 36799 - RNA, 21 nt, synthetic construct
  source 1..21: mol_type = other RNA
atgcagaatggcagcacattg

SEQ ID NO: 36800 - RNA, 21 nt, synthetic construct
  source 1..21: mol_type = other RNA
atgcagtgacccctgagaatg

SEQ ID NO: 36801 - RNA, 21 nt, synthetic construct
  source 1..21: mol_type = other RNA
atgcccacagagacttgcaca

SEQ ID NO: 36802 - RNA, 21 nt, synthetic construct
  source 1..21: mol_type = other RNA
atggacggccttccttcagac

SEQ ID NO: 36803 - RNA, 21 nt, synthetic construct
  source 1..21: mol_type = other RNA
atggcagcacattggtaagtt

SEQ ID NO: 36804 - RNA, 21 nt, synthetic construct
  source 1..21: mol_type = other RNA
atgtgctgccattctgcatgt

SEQ ID NO: 36805 - RNA, 21 nt, synthetic construct
  source 1..21: mol_type = other RNA
atgttgtgcaagtctctgtgg

SEQ ID NO: 36806 - RNA, 21 nt, synthetic construct
  source 1..21: mol_type = other RNA
atgtttggacttctgtgctca

SEQ ID NO: 36807 - RNA, 21 nt, synthetic construct
  source 1..21: mol_type = other RNA
attctcaggggtcactgcatg

SEQ ID NO: 36808 - RNA, 21 nt, synthetic construct
  source 1..21: mol_type = other RNA
attctgcatgttgtgcaagtc

SEQ ID NO: 36809 - RNA, 21 nt, synthetic construct
  source 1..21: mol_type = other RNA
attgaatatgaacacagagca

SEQ ID NO: 36810 - RNA, 21 nt, synthetic construct
  source 1..21: mol_type = other RNA
attggtaagttgggctgagga

SEQ ID NO: 36811 - RNA, 21 nt, synthetic construct
  source 1..21: mol_type = other RNA
caaacatgcagtgacccctga

SEQ ID NO: 36812 - RNA, 21 nt, synthetic construct
  source 1..21: mol_type = other RNA
caacagctgctaagctgtcct

SEQ ID NO: 36813 - RNA, 21 nt, synthetic construct
  source 1..21: mol_type = other RNA
caacatgcagaatggcagcac

SEQ ID NO: 36814 - RNA, 21 nt, synthetic construct
  source 1..21: mol_type = other RNA
caacttaccaatgtgctgcca

SEQ ID NO: 36815 - RNA, 21 nt, synthetic construct
  source 1..21: mol_type = other RNA
caagtctctgtgggcatgagc

SEQ ID NO: 36816 - RNA, 21 nt, synthetic construct
  source 1..21: mol_type = other RNA
caatgtgctgccattctgcat

SEQ ID NO: 36817 - RNA, 21 nt, synthetic construct
  source 1..21: mol_type = other RNA
cacaacatgcagaatggcagc

SEQ ID NO: 36818 - RNA, 21 nt, synthetic construct
  source 1..21: mol_type = other RNA
cacacacacttttatttttca

SEQ ID NO: 36819 - RNA, 21 nt, synthetic construct
  source 1..21: mol_type = other RNA
cacacacttttatttttcaga

SEQ ID NO: 36820 - RNA, 21 nt, synthetic construct
  source 1..21: mol_type = other RNA
cacagaagtccaaacatgcag

SEQ ID NO: 36821 - RNA, 21 nt, synthetic construct
  source 1..21: mol_type = other RNA
cacagagacttgcacaacatg

SEQ ID NO: 36822 - RNA, 21 nt, synthetic construct
  source 1..21: mol_type = other RNA
cacagagcaccagagtgccgt

SEQ ID NO: 36823 - RNA, 21 nt, synthetic construct
  source 1..21: mol_type = other RNA
cacattggtaagttgggctga

SEQ ID NO: 36824 - RNA, 21 nt, synthetic construct
  source 1..21: mol_type = other RNA
caccagagtgccgtctgggtc

SEQ ID NO: 36825 - RNA, 21 nt, synthetic construct
  source 1..21: mol_type = other RNA
cactctggtgctctgtgttca

SEQ ID NO: 36826 - RNA, 21 nt, synthetic construct
  source 1..21: mol_type = other RNA
cactgcatgtttggacttctg

SEQ ID NO: 36827 - RNA, 21 nt, synthetic construct
  source 1..21: mol_type = other RNA
cagaagtccaaacatgcagtg

SEQ ID NO: 36828 - RNA, 21 nt, synthetic construct
  source 1..21: mol_type = other RNA
cagaatggcagcacattggta

SEQ ID NO: 36829 - RNA, 21 nt, synthetic construct
  source 1..21: mol_type = other RNA
cagacccagacggcactctgg

SEQ ID NO: 36830 - RNA, 21 nt, synthetic construct
  source 1..21: mol_type = other RNA
cagacggcactctggtgctct

SEQ ID NO: 36831 - RNA, 21 nt, synthetic construct
  source 1..21: mol_type = other RNA
cagagacttgcacaacatgca

SEQ ID NO: 36832 - RNA, 21 nt, synthetic construct
  source 1..21: mol_type = other RNA
cagagcaccagagtgccgtct

SEQ ID NO: 36833 - RNA, 21 nt, synthetic construct
  source 1..21: mol_type = other RNA
cagagtgccgtctgggtctga

SEQ ID NO: 36834 - RNA, 21 nt, synthetic construct
  source 1..21: mol_type = other RNA
cagattgaatatgaacacaga

SEQ ID NO: 36835 - RNA, 21 nt, synthetic construct
  source 1..21: mol_type = other RNA
cagcacattggtaagttgggc

SEQ ID NO: 36836 - RNA, 21 nt, synthetic construct
  source 1..21: mol_type = other RNA
cagcccaacttaccaatgtgc

SEQ ID NO: 36837 - RNA, 21 nt, synthetic construct
  source 1..21: mol_type = other RNA
cagctgctaagctgtcctcag

SEQ ID NO: 36838 - RNA, 21 nt, synthetic construct
  source 1..21: mol_type = other RNA
caggggtcactgcatgtttgg

SEQ ID NO: 36839 - RNA, 21 nt, synthetic construct
  source 1..21: mol_type = other RNA
cagtgacccctgagaatggac

SEQ ID NO: 36840 - RNA, 21 nt, synthetic construct
  source 1..21: mol_type = other RNA
catgagcacagaagtccaaac

SEQ ID NO: 36841 - RNA, 21 nt, synthetic construct
  source 1..21: mol_type = other RNA
catgcagaatggcagcacatt

SEQ ID NO: 36842 - RNA, 21 nt, synthetic construct
  source 1..21: mol_type = other RNA
catgcagtgacccctgagaat

SEQ ID NO: 36843 - RNA, 21 nt, synthetic construct
  source 1..21: mol_type = other RNA
catgcccacagagacttgcac

SEQ ID NO: 36844 - RNA, 21 nt, synthetic construct
  source 1..21: mol_type = other RNA
catgttgtgcaagtctctgtg

SEQ ID NO: 36845 - RNA, 21 nt, synthetic construct
  source 1..21: mol_type = other RNA
catgtttggacttctgtgctc

SEQ ID NO: 36846 - RNA, 21 nt, synthetic construct
  source 1..21: mol_type = other RNA
cattcacacacacttttattt

SEQ ID NO: 36847 - RNA, 21 nt, synthetic construct
  source 1..21: mol_type = other RNA
cattctcaggggtcactgcat

SEQ ID NO: 36848 - RNA, 21 nt, synthetic construct
  source 1..21: mol_type = other RNA
cattctgcatgttgtgcaagt

SEQ ID NO: 36849 - RNA, 21 nt, synthetic construct
  source 1..21: mol_type = other RNA
cattggtaagttgggctgagg

SEQ ID NO: 36850 - RNA, 21 nt, synthetic construct
  source 1..21: mol_type = other RNA
ccaaacatgcagtgacccctg

SEQ ID NO: 36851 - RNA, 21 nt, synthetic construct
  source 1..21: mol_type = other RNA
ccaacttaccaatgtgctgcc

SEQ ID NO: 36852 - RNA, 21 nt, synthetic construct
  source 1..21: mol_type = other RNA
ccaatgtgctgccattctgca

SEQ ID NO: 36853 - RNA, 21 nt, synthetic construct
  source 1..21: mol_type = other RNA
ccacagagacttgcacaacat

SEQ ID NO: 36854 - RNA, 21 nt, synthetic construct
  source 1..21: mol_type = other RNA
ccagacggcactctggtgctc

SEQ ID NO: 36855 - RNA, 21 nt, synthetic construct
  source 1..21: mol_type = other RNA
ccagagtgccgtctgggtctg

SEQ ID NO: 36856 - RNA, 21 nt, synthetic construct
  source 1..21: mol_type = other RNA
ccattctcaggggtcactgca

SEQ ID NO: 36857 - RNA, 21 nt, synthetic construct
  source 1..21: mol_type = other RNA
ccattctgcatgttgtgcaag

SEQ ID NO: 36858 - RNA, 21 nt, synthetic construct
  source 1..21: mol_type = other RNA
cccaacttaccaatgtgctgc

SEQ ID NO: 36859 - RNA, 21 nt, synthetic construct
  source 1..21: mol_type = other RNA
cccacagagacttgcacaaca

SEQ ID NO: 36860 - RNA, 21 nt, synthetic construct
  source 1..21: mol_type = other RNA
cccagacggcactctggtgct

SEQ ID NO: 36861 - RNA, 21 nt, synthetic construct
  source 1..21: mol_type = other RNA
cccctgagaatggacggcctt

SEQ ID NO: 36862 - RNA, 21 nt, synthetic construct
  source 1..21: mol_type = other RNA
ccctgagaatggacggccttc

SEQ ID NO: 36863 - RNA, 21 nt, synthetic construct
  source 1..21: mol_type = other RNA
ccgtccattctcaggggtcac

SEQ ID NO: 36864 - RNA, 21 nt, synthetic construct
  source 1..21: mol_type = other RNA
ccgtctgggtctgaaggaagg

SEQ ID NO: 36865 - RNA, 21 nt, synthetic construct
  source 1..21: mol_type = other RNA
cctcagcccaacttaccaatg

SEQ ID NO: 36866 - RNA, 21 nt, synthetic construct
  source 1..21: mol_type = other RNA
cctgagaatggacggccttcc

SEQ ID NO: 36867 - RNA, 21 nt, synthetic construct
  source 1..21: mol_type = other RNA
ccttcagacccagacggcact

SEQ ID NO: 36868 - RNA, 21 nt, synthetic construct
  source 1..21: mol_type = other RNA
ccttccttcagacccagacgg

SEQ ID NO: 36869 - RNA, 21 nt, synthetic construct
  source 1..21: mol_type = other RNA
cgcattcacacacacttttat

SEQ ID NO: 36870 - RNA, 21 nt, synthetic construct
  source 1..21: mol_type = other RNA
cggcactctggtgctctgtgt

SEQ ID NO: 36871 - RNA, 21 nt, synthetic construct
  source 1..21: mol_type = other RNA
cggccttccttcagacccaga

SEQ ID NO: 36872 - RNA, 21 nt, synthetic construct
  source 1..21: mol_type = other RNA
cgtccattctcaggggtcact

SEQ ID NO: 36873 - RNA, 21 nt, synthetic construct
  source 1..21: mol_type = other RNA
cgtctgggtctgaaggaaggc

SEQ ID NO: 36874 - RNA, 21 nt, synthetic construct
  source 1..21: mol_type = other RNA
ctaactactttcgcattcaca

SEQ ID NO: 36875 - RNA, 21 nt, synthetic construct
  source 1..21: mol_type = other RNA
ctaagctgtcctcagcccaac

SEQ ID NO: 36876 - RNA, 21 nt, synthetic construct
  source 1..21: mol_type = other RNA
ctactttcgcattcacacaca

SEQ ID NO: 36877 - RNA, 21 nt, synthetic construct
  source 1..21: mol_type = other RNA
ctcaacagctgctaagctgtc

SEQ ID NO: 36878 - RNA, 21 nt, synthetic construct
  source 1..21: mol_type = other RNA
ctcagcccaacttaccaatgt

SEQ ID NO: 36879 - RNA, 21 nt, synthetic construct
  source 1..21: mol_type = other RNA
ctcaggggtcactgcatgttt

SEQ ID NO: 36880 - RNA, 21 nt, synthetic construct
  source 1..21: mol_type = other RNA
ctcatgcccacagagacttgc

SEQ ID NO: 36881 - RNA, 21 nt, synthetic construct
  source 1..21: mol_type = other RNA
ctctggtgctctgtgttcata

SEQ ID NO: 36882 - RNA, 21 nt, synthetic construct
  source 1..21: mol_type = other RNA
ctctgtgggcatgagcacaga

SEQ ID NO: 36883 - RNA, 21 nt, synthetic construct
  source 1..21: mol_type = other RNA
ctctgtgttcatattcaatct

SEQ ID NO: 36884 - RNA, 21 nt, synthetic construct
  source 1..21: mol_type = other RNA
ctgaaaaataaaagtgtgtgt

SEQ ID NO: 36885 - RNA, 21 nt, synthetic construct
  source 1..21: mol_type = other RNA
ctgaaggaaggccgtccattc

SEQ ID NO: 36886 - RNA, 21 nt, synthetic construct
  source 1..21: mol_type = other RNA
ctgagaatggacggccttcct

SEQ ID NO: 36887 - RNA, 21 nt, synthetic construct
  source 1..21: mol_type = other RNA
ctgcatgttgtgcaagtctct

SEQ ID NO: 36888 - RNA, 21 nt, synthetic construct
  source 1..21: mol_type = other RNA
ctgcatgtttggacttctgtg

SEQ ID NO: 36889 - RNA, 21 nt, synthetic construct
  source 1..21: mol_type = other RNA
ctgccattctgcatgttgtgc

SEQ ID NO: 36890 - RNA, 21 nt, synthetic construct
  source 1..21: mol_type = other RNA
ctgctaagctgtcctcagccc

SEQ ID NO: 36891 - RNA, 21 nt, synthetic construct
  source 1..21: mol_type = other RNA
ctgggtctgaaggaaggccgt

SEQ ID NO: 36892 - RNA, 21 nt, synthetic construct
  source 1..21: mol_type = other RNA
ctggtgctctgtgttcatatt

SEQ ID NO: 36893 - RNA, 21 nt, synthetic construct
  source 1..21: mol_type = other RNA
ctgtcctcagcccaacttacc

SEQ ID NO: 36894 - RNA, 21 nt, synthetic construct
  source 1..21: mol_type = other RNA
ctgtgctcatgcccacagaga

SEQ ID NO: 36895 - RNA, 21 nt, synthetic construct
  source 1..21: mol_type = other RNA
ctgtgggcatgagcacagaag

SEQ ID NO: 36896 - RNA, 21 nt, synthetic construct
  source 1..21: mol_type = other RNA
ctgtgttcatattcaatctga

SEQ ID NO: 36897 - RNA, 21 nt, synthetic construct
  source 1..21: mol_type = other RNA
cttaccaatgtgctgccattc

SEQ ID NO: 36898 - RNA, 21 nt, synthetic construct
  source 1..21: mol_type = other RNA
cttcagacccagacggcactc

SEQ ID NO: 36899 - RNA, 21 nt, synthetic construct
  source 1..21: mol_type = other RNA
cttccttcagacccagacggc

SEQ ID NO: 36900 - RNA, 21 nt, synthetic construct
  source 1..21: mol_type = other RNA
cttctgtgctcatgcccacag

SEQ ID NO: 36901 - RNA, 21 nt, synthetic construct
  source 1..21: mol_type = other RNA
cttgcacaacatgcagaatgg

SEQ ID NO: 36902 - RNA, 21 nt, synthetic construct
  source 1..21: mol_type = other RNA
ctttcgcattcacacacactt

SEQ ID NO: 36903 - RNA, 21 nt, synthetic construct
  source 1..21: mol_type = other RNA
gaaaaataaaagtgtgtgtga

SEQ ID NO: 36904 - RNA, 21 nt, synthetic construct
  source 1..21: mol_type = other RNA
gaacacagagcaccagagtgc

SEQ ID NO: 36905 - RNA, 21 nt, synthetic construct
  source 1..21: mol_type = other RNA
gaaggaaggccgtccattctc

SEQ ID NO: 36906 - RNA, 21 nt, synthetic construct
  source 1..21: mol_type = other RNA
gaaggccgtccattctcaggg

SEQ ID NO: 36907 - RNA, 21 nt, synthetic construct
  source 1..21: mol_type = other RNA
gaagtccaaacatgcagtgac

SEQ ID NO: 36908 - RNA, 21 nt, synthetic construct
  source 1..21: mol_type = other RNA
gaatatgaacacagagcacca

SEQ ID NO: 36909 - RNA, 21 nt, synthetic construct
  source 1..21: mol_type = other RNA
gaatggacggccttccttcag

SEQ ID NO: 36910 - RNA, 21 nt, synthetic construct
  source 1..21: mol_type = other RNA
gaatggcagcacattggtaag

SEQ ID NO: 36911 - RNA, 21 nt, synthetic construct
  source 1..21: mol_type = other RNA
gacccagacggcactctggtg

SEQ ID NO: 36912 - RNA, 21 nt, synthetic construct
  source 1..21: mol_type = other RNA
gacccctgagaatggacggcc

SEQ ID NO: 36913 - RNA, 21 nt, synthetic construct
  source 1..21: mol_type = other RNA
gacggcactctggtgctctgt

SEQ ID NO: 36914 - RNA, 21 nt, synthetic construct
  source 1..21: mol_type = other RNA
gacggccttccttcagaccca

SEQ ID NO: 36915 - RNA, 21 nt, synthetic construct
  source 1..21: mol_type = other RNA
gactcaacagctgctaagctg

SEQ ID NO: 36916 - RNA, 21 nt, synthetic construct
  source 1..21: mol_type = other RNA
gacttctgtgctcatgcccac

SEQ ID NO: 36917 - RNA, 21 nt, synthetic construct
  source 1..21: mol_type = other RNA
gacttgcacaacatgcagaat

SEQ ID NO: 36918 - RNA, 21 nt, synthetic construct
  source 1..21: mol_type = other RNA
gagaatggacggccttccttc

SEQ ID NO: 36919 - RNA, 21 nt, synthetic construct
  source 1..21: mol_type = other RNA
gagacttgcacaacatgcaga

SEQ ID NO: 36920 - RNA, 21 nt, synthetic construct
  source 1..21: mol_type = other RNA
gagcacagaagtccaaacatg

SEQ ID NO: 36921 - RNA, 21 nt, synthetic construct
  source 1..21: mol_type = other RNA
gagcaccagagtgccgtctgg

SEQ ID NO: 36922 - RNA, 21 nt, synthetic construct
  source 1..21: mol_type = other RNA
gagtgccgtctgggtctgaag

SEQ ID NO: 36923 - RNA, 21 nt, synthetic construct
  source 1..21: mol_type = other RNA
gattgaatatgaacacagagc

SEQ ID NO: 36924 - RNA, 21 nt, synthetic construct
  source 1..21: mol_type = other RNA
gcaagtctctgtgggcatgag

SEQ ID NO: 36925 - RNA, 21 nt, synthetic construct
  source 1..21: mol_type = other RNA
gcacaacatgcagaatggcag

SEQ ID NO: 36926 - RNA, 21 nt, synthetic construct
  source 1..21: mol_type = other RNA
gcacagaagtccaaacatgca

SEQ ID NO: 36927 - RNA, 21 nt, synthetic construct
  source 1..21: mol_type = other RNA
gcacattggtaagttgggctg

SEQ ID NO: 36928 - RNA, 21 nt, synthetic construct
  source 1..21: mol_type = other RNA
gcaccagagtgccgtctgggt

SEQ ID NO: 36929 - RNA, 21 nt, synthetic construct
  source 1..21: mol_type = other RNA
gcactctggtgctctgtgttc

SEQ ID NO: 36930 - RNA, 21 nt, synthetic construct
  source 1..21: mol_type = other RNA
gcagaatggcagcacattggt

SEQ ID NO: 36931 - RNA, 21 nt, synthetic construct
  source 1..21: mol_type = other RNA
gcagcacattggtaagttggg

SEQ ID NO: 36932 - RNA, 21 nt, synthetic construct
  source 1..21: mol_type = other RNA
gcagtgacccctgagaatgga

SEQ ID NO: 36933 - RNA, 21 nt, synthetic construct
  source 1..21: mol_type = other RNA
gcatgagcacagaagtccaaa

SEQ ID NO: 36934 - RNA, 21 nt, synthetic construct
  source 1..21: mol_type = other RNA
gcatgttgtgcaagtctctgt

SEQ ID NO: 36935 - RNA, 21 nt, synthetic construct
  source 1..21: mol_type = other RNA
gcatgtttggacttctgtgct

SEQ ID NO: 36936 - RNA, 21 nt, synthetic construct
  source 1..21: mol_type = other RNA
gcattcacacacacttttatt

SEQ ID NO: 36937 - RNA, 21 nt, synthetic construct
  source 1..21: mol_type = other RNA
gccattctgcatgttgtgcaa

SEQ ID NO: 36938 - RNA, 21 nt, synthetic construct
  source 1..21: mol_type = other RNA
gcccaacttaccaatgtgctg

SEQ ID NO: 36939 - RNA, 21 nt, synthetic construct
  source 1..21: mol_type = other RNA
gcccacagagacttgcacaac

SEQ ID NO: 36940 - RNA, 21 nt, synthetic construct
  source 1..21: mol_type = other RNA
gccgtccattctcaggggtca

SEQ ID NO: 36941 - RNA, 21 nt, synthetic construct
  source 1..21: mol_type = other RNA
gccgtctgggtctgaaggaag

SEQ ID NO: 36942 - RNA, 21 nt, synthetic construct
  source 1..21: mol_type = other RNA
gccttccttcagacccagacg

SEQ ID NO: 36943 - RNA, 21 nt, synthetic construct
  source 1..21: mol_type = other RNA
gctaagctgtcctcagcccaa

SEQ ID NO: 36944 - RNA, 21 nt, synthetic construct
  source 1..21: mol_type = other RNA
gctcatgcccacagagacttg

SEQ ID NO: 36945 - RNA, 21 nt, synthetic construct
  source 1..21: mol_type = other RNA
gctctgtgttcatattcaatc

SEQ ID NO: 36946 - RNA, 21 nt, synthetic construct
  source 1..21: mol_type = other RNA
gctgaggacagcttagcagct

SEQ ID NO: 36947 - RNA, 21 nt, synthetic construct
  source 1..21: mol_type = other RNA
gctgccattctgcatgttgtg

SEQ ID NO: 36948 - RNA, 21 nt, synthetic construct
  source 1..21: mol_type = other RNA
gctgctaagctgtcctcagcc

SEQ ID NO: 36949 - RNA, 21 nt, synthetic construct
  source 1..21: mol_type = other RNA
gctgtcctcagcccaacttac

SEQ ID NO: 36950 - RNA, 21 nt, synthetic construct
  source 1..21: mol_type = other RNA
ggaaggccgtccattctcagg

SEQ ID NO: 36951 - RNA, 21 nt, synthetic construct
  source 1..21: mol_type = other RNA
ggacggccttccttcagaccc

SEQ ID NO: 36952 - RNA, 21 nt, synthetic construct
  source 1..21: mol_type = other RNA
ggacttctgtgctcatgccca

SEQ ID NO: 36953 - RNA, 21 nt, synthetic construct
  source 1..21: mol_type = other RNA
ggcactctggtgctctgtgtt

SEQ ID NO: 36954 - RNA, 21 nt, synthetic construct
  source 1..21: mol_type = other RNA
ggcagcacattggtaagttgg

SEQ ID NO: 36955 - RNA, 21 nt, synthetic construct
  source 1..21: mol_type = other RNA
ggcatgagcacagaagtccaa

SEQ ID NO: 36956 - RNA, 21 nt, synthetic construct
  source 1..21: mol_type = other RNA
ggccgtccattctcaggggtc

SEQ ID NO: 36957 - RNA, 21 nt, synthetic construct
  source 1..21: mol_type = other RNA
ggccttccttcagacccagac

SEQ ID NO: 36958 - RNA, 21 nt, synthetic construct
  source 1..21: mol_type = other RNA
ggctgaggacagcttagcagc

SEQ ID NO: 36959 - RNA, 21 nt, synthetic construct
  source 1..21: mol_type = other RNA
gggcatgagcacagaagtcca

SEQ ID NO: 36960 - RNA, 21 nt, synthetic construct
  source 1..21: mol_type = other RNA
gggctgaggacagcttagcag

SEQ ID NO: 36961 - RNA, 21 nt, synthetic construct
  source 1..21: mol_type = other RNA
ggggtcactgcatgtttggac

SEQ ID NO: 36962 - RNA, 21 nt, synthetic construct
  source 1..21: mol_type = other RNA
gggtcactgcatgtttggact

SEQ ID NO: 36963 - RNA, 21 nt, synthetic construct
  source 1..21: mol_type = other RNA
gggtctgaaggaaggccgtcc

SEQ ID NO: 36964 - RNA, 21 nt, synthetic construct
  source 1..21: mol_type = other RNA
ggtaagttgggctgaggacag

SEQ ID NO: 36965 - RNA, 21 nt, synthetic construct
  source 1..21: mol_type = other RNA
ggtcactgcatgtttggactt

SEQ ID NO: 36966 - RNA, 21 nt, synthetic construct
  source 1..21: mol_type = other RNA
ggtctgaaggaaggccgtcca

SEQ ID NO: 36967 - RNA, 21 nt, synthetic construct
  source 1..21: mol_type = other RNA
ggtgctctgtgttcatattca

SEQ ID NO: 36968 - RNA, 21 nt, synthetic construct
  source 1..21: mol_type = other RNA
gtaagttgggctgaggacagc

SEQ ID NO: 36969 - RNA, 21 nt, synthetic construct
  source 1..21: mol_type = other RNA
gtcactgcatgtttggacttc

SEQ ID NO: 36970 - RNA, 21 nt, synthetic construct
  source 1..21: mol_type = other RNA
gtccaaacatgcagtgacccc

SEQ ID NO: 36971 - RNA, 21 nt, synthetic construct
  source 1..21: mol_type = other RNA
gtccattctcaggggtcactg

SEQ ID NO: 36972 - RNA, 21 nt, synthetic construct
  source 1..21: mol_type = other RNA
gtcctcagcccaacttaccaa

SEQ ID NO: 36973 - RNA, 21 nt, synthetic construct
  source 1..21: mol_type = other RNA
gtctctgtgggcatgagcaca

SEQ ID NO: 36974 - RNA, 21 nt, synthetic construct
  source 1..21: mol_type = other RNA
gtctgaaggaaggccgtccat

SEQ ID NO: 36975 - RNA, 21 nt, synthetic construct
  source 1..21: mol_type = other RNA
gtctgggtctgaaggaaggcc

SEQ ID NO: 36976 - RNA, 21 nt, synthetic construct
  source 1..21: mol_type = other RNA
gtgacccctgagaatggacgg

SEQ ID NO: 36977 - RNA, 21 nt, synthetic construct
  source 1..21: mol_type = other RNA
gtgcaagtctctgtgggcatg

SEQ ID NO: 36978 - RNA, 21 nt, synthetic construct
  source 1..21: mol_type = other RNA
gtgccgtctgggtctgaagga

SEQ ID NO: 36979 - RNA, 21 nt, synthetic construct
  source 1..21: mol_type = other RNA
gtgctcatgcccacagagact

SEQ ID NO: 36980 - RNA, 21 nt, synthetic construct
  source 1..21: mol_type = other RNA
gtgctctgtgttcatattcaa

SEQ ID NO: 36981 - RNA, 21 nt, synthetic construct
  source 1..21: mol_type = other RNA
gtgctgccattctgcatgttg

SEQ ID NO: 36982 - RNA, 21 nt, synthetic construct
  source 1..21: mol_type = other RNA
gtgggcatgagcacagaagtc

SEQ ID NO: 36983 - RNA, 21 nt, synthetic construct
  source 1..21: mol_type = other RNA
gtgttcatattcaatctgaaa

SEQ ID NO: 36984 - RNA, 21 nt, synthetic construct
  source 1..21: mol_type = other RNA
gttgggctgaggacagcttag

SEQ ID NO: 36985 - RNA, 21 nt, synthetic construct
  source 1..21: mol_type = other RNA
gttgtgcaagtctctgtgggc

SEQ ID NO: 36986 - RNA, 21 nt, synthetic construct
  source 1..21: mol_type = other RNA
gtttggacttctgtgctcatg

SEQ ID NO: 36987 - RNA, 21 nt, synthetic construct
  source 1..21: mol_type = other RNA
taaaagtgtgtgtgaatgcga

SEQ ID NO: 36988 - RNA, 21 nt, synthetic construct
  source 1..21: mol_type = other RNA
taactactttcgcattcacac

SEQ ID NO: 36989 - RNA, 21 nt, synthetic construct
  source 1..21: mol_type = other RNA
taagctgtcctcagcccaact

SEQ ID NO: 36990 - RNA, 21 nt, synthetic construct
  source 1..21: mol_type = other RNA
taagttgggctgaggacagct

SEQ ID NO: 36991 - RNA, 21 nt, synthetic construct
  source 1..21: mol_type = other RNA
taccaatgtgctgccattctg

SEQ ID NO: 36992 - RNA, 21 nt, synthetic construct
  source 1..21: mol_type = other RNA
tactttcgcattcacacacac

SEQ ID NO: 36993 - RNA, 21 nt, synthetic construct
  source 1..21: mol_type = other RNA
tatgaacacagagcaccagag

SEQ ID NO: 36994 - RNA, 21 nt, synthetic construct
  source 1..21: mol_type = other RNA
tcaacagctgctaagctgtcc

SEQ ID NO: 36995 - RNA, 21 nt, synthetic construct
  source 1..21: mol_type = other RNA
tcacacacacttttatttttc

SEQ ID NO: 36996 - RNA, 21 nt, synthetic construct
  source 1..21: mol_type = other RNA
tcactgcatgtttggacttct

SEQ ID NO: 36997 - RNA, 21 nt, synthetic construct
  source 1..21: mol_type = other RNA
tcagacccagacggcactctg

SEQ ID NO: 36998 - RNA, 21 nt, synthetic construct
  source 1..21: mol_type = other RNA
tcagattgaatatgaacacag

SEQ ID NO: 36999 - RNA, 21 nt, synthetic construct
  source 1..21: mol_type = other RNA
tcagcccaacttaccaatgtg

SEQ ID NO: 37000 - RNA, 21 nt, synthetic construct
  source 1..21: mol_type = other RNA
tcaggggtcactgcatgtttg

SEQ ID NO: 37001 - RNA, 21 nt, synthetic construct
  source 1..21: mol_type = other RNA
tcatgcccacagagacttgca

SEQ ID NO: 37002 - RNA, 21 nt, synthetic construct
  source 1..21: mol_type = other RNA
tccaaacatgcagtgacccct

SEQ ID NO: 37003 - RNA, 21 nt, synthetic construct
  source 1..21: mol_type = other RNA
tccattctcaggggtcactgc

SEQ ID NO: 37004 - RNA, 21 nt, synthetic construct
  source 1..21: mol_type = other RNA
tcctcagcccaacttaccaat

SEQ ID NO: 37005 - RNA, 21 nt, synthetic construct
  source 1..21: mol_type = other RNA
tccttcagacccagacggcac

SEQ ID NO: 37006 - RNA, 21 nt, synthetic construct
  source 1..21: mol_type = other RNA
tcgcattcacacacactttta

SEQ ID NO: 37007 - RNA, 21 nt, synthetic construct
  source 1..21: mol_type = other RNA
tctcaggggtcactgcatgtt

SEQ ID NO: 37008 - RNA, 21 nt, synthetic construct
  source 1..21: mol_type = other RNA
tctctgtgggcatgagcacag

SEQ ID NO: 37009 - RNA, 21 nt, synthetic construct
  source 1..21: mol_type = other RNA
tctgaaaaataaaagtgtgtg

SEQ ID NO: 37010 - RNA, 21 nt, synthetic construct
  source 1..21: mol_type = other RNA
tctgaaggaaggccgtccatt

SEQ ID NO: 37011 - RNA, 21 nt, synthetic construct
  source 1..21: mol_type = other RNA
tctgcatgttgtgcaagtctc

SEQ ID NO: 37012 - RNA, 21 nt, synthetic construct
  source 1..21: mol_type = other RNA
tctgggtctgaaggaaggccg

SEQ ID NO: 37013 - RNA, 21 nt, synthetic construct
  source 1..21: mol_type = other RNA
tctggtgctctgtgttcatat

SEQ ID NO: 37014 - RNA, 21 nt, synthetic construct
  source 1..21: mol_type = other RNA
tctgtgctcatgcccacagag

SEQ ID NO: 37015 - RNA, 21 nt, synthetic construct
  source 1..21: mol_type = other RNA
tctgtgggcatgagcacagaa

SEQ ID NO: 37016 - RNA, 21 nt, synthetic construct
  source 1..21: mol_type = other RNA
tctgtgttcatattcaatctg

SEQ ID NO: 37017 - RNA, 21 nt, synthetic construct
  source 1..21: mol_type = other RNA
tgaaaaataaaagtgtgtgtg

SEQ ID NO: 37018 - RNA, 21 nt, synthetic construct
  source 1..21: mol_type = other RNA
tgaacacagagcaccagagtg

SEQ ID NO: 37019 - RNA, 21 nt, synthetic construct
  source 1..21: mol_type = other RNA
tgaaggaaggccgtccattct

SEQ ID NO: 37020 - RNA, 21 nt, synthetic construct
  source 1..21: mol_type = other RNA
tgaatatgaacacagagcacc

SEQ ID NO: 37021 - RNA, 21 nt, synthetic construct
  source 1..21: mol_type = other RNA
tgacccctgagaatggacggc

SEQ ID NO: 37022 - RNA, 21 nt, synthetic construct
  source 1..21: mol_type = other RNA
tgagaatggacggccttcctt

SEQ ID NO: 37023 - RNA, 21 nt, synthetic construct
  source 1..21: mol_type = other RNA
tgagcacagaagtccaaacat

SEQ ID NO: 37024 - RNA, 21 nt, synthetic construct
  source 1..21: mol_type = other RNA
tgcaagtctctgtgggcatga

SEQ ID NO: 37025 - RNA, 21 nt, synthetic construct
  source 1..21: mol_type = other RNA
tgcacaacatgcagaatggca

SEQ ID NO: 37026 - RNA, 21 nt, synthetic construct
  source 1..21: mol_type = other RNA
tgcagaatggcagcacattgg

SEQ ID NO: 37027 - RNA, 21 nt, synthetic construct
  source 1..21: mol_type = other RNA
tgcagtgacccctgagaatgg

SEQ ID NO: 37028 - RNA, 21 nt, synthetic construct
  source 1..21: mol_type = other RNA
tgcatgttgtgcaagtctctg

SEQ ID NO: 37029 - RNA, 21 nt, synthetic construct
  source 1..21: mol_type = other RNA
tgcatgtttggacttctgtgc

SEQ ID NO: 37030 - RNA, 21 nt, synthetic construct
  source 1..21: mol_type = other RNA
tgccattctgcatgttgtgca

SEQ ID NO: 37031 - RNA, 21 nt, synthetic construct
  source 1..21: mol_type = other RNA
tgcccacagagacttgcacaa

SEQ ID NO: 37032 - RNA, 21 nt, synthetic construct
  source 1..21: mol_type = other RNA
tgccgtctgggtctgaaggaa

SEQ ID NO: 37033 - RNA, 21 nt, synthetic construct
  source 1..21: mol_type = other RNA
tgctaagctgtcctcagccca

SEQ ID NO: 37034 - RNA, 21 nt, synthetic construct
  source 1..21: mol_type = other RNA
tgctcatgcccacagagactt

SEQ ID NO: 37035 - RNA, 21 nt, synthetic construct
  source 1..21: mol_type = other RNA
tgctctgtgttcatattcaat

SEQ ID NO: 37036 - RNA, 21 nt, synthetic construct
  source 1..21: mol_type = other RNA
tgctgccattctgcatgttgt

SEQ ID NO: 37037 - RNA, 21 nt, synthetic construct
  source 1..21: mol_type = other RNA
tggacggccttccttcagacc

SEQ ID NO: 37038 - RNA, 21 nt, synthetic construct
  source 1..21: mol_type = other RNA
tggacttctgtgctcatgccc

SEQ ID NO: 37039 - RNA, 21 nt, synthetic construct
  source 1..21: mol_type = other RNA
tggcagcacattggtaagttg

SEQ ID NO: 37040 - RNA, 21 nt, synthetic construct
  source 1..21: mol_type = other RNA
tgggcatgagcacagaagtcc

SEQ ID NO: 37041 - RNA, 21 nt, synthetic construct
  source 1..21: mol_type = other RNA
tgggctgaggacagcttagca

SEQ ID NO: 37042 - RNA, 21 nt, synthetic construct
  source 1..21: mol_type = other RNA
tgggtctgaaggaaggccgtc

SEQ ID NO: 37043 - RNA, 21 nt, synthetic construct
  source 1..21: mol_type = other RNA
tggtaagttgggctgaggaca

SEQ ID NO: 37044 - RNA, 21 nt, synthetic construct
  source 1..21: mol_type = other RNA
tggtgctctgtgttcatattc

SEQ ID NO: 37045 - RNA, 21 nt, synthetic construct
  source 1..21: mol_type = other RNA
tgtcctcagcccaacttacca

SEQ ID NO: 37046 - RNA, 21 nt, synthetic construct
  source 1..21: mol_type = other RNA
tgtgcaagtctctgtgggcat

SEQ ID NO: 37047 - RNA, 21 nt, synthetic construct
  source 1..21: mol_type = other RNA
tgtgctcatgcccacagagac

SEQ ID NO: 37048 - RNA, 21 nt, synthetic construct
  source 1..21: mol_type = other RNA
tgtgctgccattctgcatgtt

SEQ ID NO: 37049 - RNA, 21 nt, synthetic construct
  source 1..21: mol_type = other RNA
tgtgggcatgagcacagaagt

SEQ ID NO: 37050 - RNA, 21 nt, synthetic construct
  source 1..21: mol_type = other RNA
tgtgttcatattcaatctgaa

SEQ ID NO: 37051 - RNA, 21 nt, synthetic construct
  source 1..21: mol_type = other RNA
tgttgtgcaagtctctgtggg

SEQ ID NO: 37052 - RNA, 21 nt, synthetic construct
  source 1..21: mol_type = other RNA
tgtttggacttctgtgctcat

SEQ ID NO: 37053 - RNA, 21 nt, synthetic construct
  source 1..21: mol_type = other RNA
ttaccaatgtgctgccattct

SEQ ID NO: 37054 - RNA, 21 nt, synthetic construct
  source 1..21: mol_type = other RNA
ttcagacccagacggcactct

SEQ ID NO: 37055 - RNA, 21 nt, synthetic construct
  source 1..21: mol_type = other RNA
ttcagattgaatatgaacaca

SEQ ID NO: 37056 - RNA, 21 nt, synthetic construct
  source 1..21: mol_type = other RNA
ttccttcagacccagacggca

SEQ ID NO: 37057 - RNA, 21 nt, synthetic construct
  source 1..21: mol_type = other RNA
ttcgcattcacacacactttt

SEQ ID NO: 37058 - RNA, 21 nt, synthetic construct
  source 1..21: mol_type = other RNA
ttctcaggggtcactgcatgt

SEQ ID NO: 37059 - RNA, 21 nt, synthetic construct
  source 1..21: mol_type = other RNA
ttctgcatgttgtgcaagtct

SEQ ID NO: 37060 - RNA, 21 nt, synthetic construct
  source 1..21: mol_type = other RNA
ttctgtgctcatgcccacaga

SEQ ID NO: 37061 - RNA, 21 nt, synthetic construct
  source 1..21: mol_type = other RNA
ttgaatatgaacacagagcac

SEQ ID NO: 37062 - RNA, 21 nt, synthetic construct
  source 1..21: mol_type = other RNA
ttgcacaacatgcagaatggc

SEQ ID NO: 37063 - RNA, 21 nt, synthetic construct
  source 1..21: mol_type = other RNA
ttggacttctgtgctcatgcc

SEQ ID NO: 37064 - RNA, 21 nt, synthetic construct
  source 1..21: mol_type = other RNA
ttgggctgaggacagcttagc

SEQ ID NO: 37065 - RNA, 21 nt, synthetic construct
  source 1..21: mol_type = other RNA
ttggtaagttgggctgaggac

SEQ ID NO: 37066 - RNA, 21 nt, synthetic construct
  source 1..21: mol_type = other RNA
ttgtgcaagtctctgtgggca

SEQ ID NO: 37067 - RNA, 21 nt, synthetic construct
  source 1..21: mol_type = other RNA
tttcagattgaatatgaacac

SEQ ID NO: 37068 - RNA, 21 nt, synthetic construct
  source 1..21: mol_type = other RNA
tttcgcattcacacacacttt

SEQ ID NO: 37069 - RNA, 21 nt, synthetic construct
  source 1..21: mol_type = other RNA
tttggacttctgtgctcatgc

SEQ ID NO: 37070 - RNA, 22 nt, synthetic construct
  source 1..22: mol_type = other RNA
aaaagtgtgtgtgaatgcgaaa

SEQ ID NO: 37071 - RNA, 22 nt, synthetic construct
  source 1..22: mol_type = other RNA
aaaataaaagtgtgtgtgaatg

SEQ ID NO: 37072 - RNA, 22 nt, synthetic construct
  source 1..22: mol_type = other RNA
aaacatgcagtgacccctgaga

SEQ ID NO: 37073 - RNA, 22 nt, synthetic construct
  source 1..22: mol_type = other RNA
aaataaaagtgtgtgtgaatgc

SEQ ID NO: 37074 - RNA, 22 nt, synthetic construct
  source 1..22: mol_type = other RNA
aacacagagcaccagagtgccg

SEQ ID NO: 37075 - RNA, 22 nt, synthetic construct
  source 1..22: mol_type = other RNA
aacagctgctaagctgtcctca

SEQ ID NO: 37076 - RNA, 22 nt, synthetic construct
  source 1..22: mol_type = other RNA
aacatgcagaatggcagcacat

SEQ ID NO: 37077 - RNA, 22 nt, synthetic construct
  source 1..22: mol_type = other RNA
aacatgcagtgacccctgagaa

SEQ ID NO: 37078 - RNA, 22 nt, synthetic construct
  source 1..22: mol_type = other RNA
aactactttcgcattcacacac

SEQ ID NO: 37079 - RNA, 22 nt, synthetic construct
  source 1..22: mol_type = other RNA
aacttaccaatgtgctgccatt

SEQ ID NO: 37080 - RNA, 22 nt, synthetic construct
  source 1..22: mol_type = other RNA
aagctgtcctcagcccaactta

SEQ ID NO: 37081 - RNA, 22 nt, synthetic construct
  source 1..22: mol_type = other RNA
aaggaaggccgtccattctcag

SEQ ID NO: 37082 - RNA, 22 nt, synthetic construct
  source 1..22: mol_type = other RNA
aaggccgtccattctcaggggt

SEQ ID NO: 37083 - RNA, 22 nt, synthetic construct
  source 1..22: mol_type = other RNA
aagtccaaacatgcagtgaccc

SEQ ID NO: 37084 - RNA, 22 nt, synthetic construct
  source 1..22: mol_type = other RNA
aagtctctgtgggcatgagcac

SEQ ID NO: 37085 - RNA, 22 nt, synthetic construct
  source 1..22: mol_type = other RNA
aagttgggctgaggacagctta

SEQ ID NO: 37086 - RNA, 22 nt, synthetic construct
  source 1..22: mol_type = other RNA
aataaaagtgtgtgtgaatgcg

SEQ ID NO: 37087 - RNA, 22 nt, synthetic construct
  source 1..22: mol_type = other RNA
aatatgaacacagagcaccaga

SEQ ID NO: 37088 - RNA, 22 nt, synthetic construct
  source 1..22: mol_type = other RNA
aatggacggccttccttcagac

SEQ ID NO: 37089 - RNA, 22 nt, synthetic construct
  source 1..22: mol_type = other RNA
aatggcagcacattggtaagtt

SEQ ID NO: 37090 - RNA, 22 nt, synthetic construct
  source 1..22: mol_type = other RNA
aatgtgctgccattctgcatgt

SEQ ID NO: 37091 - RNA, 22 nt, synthetic construct
  source 1..22: mol_type = other RNA
acaacatgcagaatggcagcac

SEQ ID NO: 37092 - RNA, 22 nt, synthetic construct
  source 1..22: mol_type = other RNA
acacacacttttatttttcaga

SEQ ID NO: 37093 - RNA, 22 nt, synthetic construct
  source 1..22: mol_type = other RNA
acacagagcaccagagtgccgt

SEQ ID NO: 37094 - RNA, 22 nt, synthetic construct
  source 1..22: mol_type = other RNA
acagaagtccaaacatgcagtg

SEQ ID NO: 37095 - RNA, 22 nt, synthetic construct
  source 1..22: mol_type = other RNA
acagagacttgcacaacatgca

SEQ ID NO: 37096 - RNA, 22 nt, synthetic construct
  source 1..22: mol_type = other RNA
acagagcaccagagtgccgtct

SEQ ID NO: 37097 - RNA, 22 nt, synthetic construct
  source 1..22: mol_type = other RNA
acagctgctaagctgtcctcag

SEQ ID NO: 37098 - RNA, 22 nt, synthetic construct
  source 1..22: mol_type = other RNA
acatgcagaatggcagcacatt

SEQ ID NO: 37099 - RNA, 22 nt, synthetic construct
  source 1..22: mol_type = other RNA
acatgcagtgacccctgagaat

SEQ ID NO: 37100 - RNA, 22 nt, synthetic construct
  source 1..22: mol_type = other RNA
acattggtaagttgggctgagg

SEQ ID NO: 37101 - RNA, 22 nt, synthetic construct
  source 1..22: mol_type = other RNA
accaatgtgctgccattctgca

SEQ ID NO: 37102 - RNA, 22 nt, synthetic construct
  source 1..22: mol_type = other RNA
accagagtgccgtctgggtctg

SEQ ID NO: 37103 - RNA, 22 nt, synthetic construct
  source 1..22: mol_type = other RNA
acccagacggcactctggtgct

SEQ ID NO: 37104 - RNA, 22 nt, synthetic construct
  source 1..22: mol_type = other RNA
acccctgagaatggacggcctt

SEQ ID NO: 37105 - RNA, 22 nt, synthetic construct
  source 1..22: mol_type = other RNA
acggcactctggtgctctgtgt

SEQ ID NO: 37106 - RNA, 22 nt, synthetic construct
  source 1..22: mol_type = other RNA
acggccttccttcagacccaga

SEQ ID NO: 37107 - RNA, 22 nt, synthetic construct
  source 1..22: mol_type = other RNA
actactttcgcattcacacaca

SEQ ID NO: 37108 - RNA, 22 nt, synthetic construct
  source 1..22: mol_type = other RNA
actcaacagctgctaagctgtc

SEQ ID NO: 37109 - RNA, 22 nt, synthetic construct
  source 1..22: mol_type = other RNA
actctggtgctctgtgttcata

SEQ ID NO: 37110 - RNA, 22 nt, synthetic construct
  source 1..22: mol_type = other RNA
actgcatgtttggacttctgtg

SEQ ID NO: 37111 - RNA, 22 nt, synthetic construct
  source 1..22: mol_type = other RNA
acttaccaatgtgctgccattc

SEQ ID NO: 37112 - RNA, 22 nt, synthetic construct
  source 1..22: mol_type = other RNA
acttctgtgctcatgcccacag

SEQ ID NO: 37113 - RNA, 22 nt, synthetic construct
  source 1..22: mol_type = other RNA
acttgcacaacatgcagaatgg

SEQ ID NO: 37114 - RNA, 22 nt, synthetic construct
  source 1..22: mol_type = other RNA
actttcgcattcacacacactt

SEQ ID NO: 37115 - RNA, 22 nt, synthetic construct
  source 1..22: mol_type = other RNA
agaagtccaaacatgcagtgac

SEQ ID NO: 37116 - RNA, 22 nt, synthetic construct
  source 1..22: mol_type = other RNA
agaatggacggccttccttcag

SEQ ID NO: 37117 - RNA, 22 nt, synthetic construct
  source 1..22: mol_type = other RNA
agaatggcagcacattggtaag

SEQ ID NO: 37118 - RNA, 22 nt, synthetic construct
  source 1..22: mol_type = other RNA
agacccagacggcactctggtg

SEQ ID NO: 37119 - RNA, 22 nt, synthetic construct
  source 1..22: mol_type = other RNA
agacggcactctggtgctctgt

SEQ ID NO: 37120 - RNA, 22 nt, synthetic construct
  source 1..22: mol_type = other RNA
agacttgcacaacatgcagaat

SEQ ID NO: 37121 - RNA, 22 nt, synthetic construct
  source 1..22: mol_type = other RNA
agagacttgcacaacatgcaga

SEQ ID NO: 37122 - RNA, 22 nt, synthetic construct
  source 1..22: mol_type = other RNA
agagcaccagagtgccgtctgg

SEQ ID NO: 37123 - RNA, 22 nt, synthetic construct
  source 1..22: mol_type = other RNA
agagtgccgtctgggtctgaag

SEQ ID NO: 37124 - RNA, 22 nt, synthetic construct
  source 1..22: mol_type = other RNA
agattgaatatgaacacagagc

SEQ ID NO: 37125 - RNA, 22 nt, synthetic construct
  source 1..22: mol_type = other RNA
agcacagaagtccaaacatgca

SEQ ID NO: 37126 - RNA, 22 nt, synthetic construct
  source 1..22: mol_type = other RNA
agcacattggtaagttgggctg

SEQ ID NO: 37127 - RNA, 22 nt, synthetic construct
  source 1..22: mol_type = other RNA
agcaccagagtgccgtctgggt

SEQ ID NO: 37128 - RNA, 22 nt, synthetic construct
  source 1..22: mol_type = other RNA
agcccaacttaccaatgtgctg

SEQ ID NO: 37129 - RNA, 22 nt, synthetic construct
  source 1..22: mol_type = other RNA
agctgctaagctgtcctcagcc

SEQ ID NO: 37130 - RNA, 22 nt, synthetic construct
  source 1..22: mol_type = other RNA
agctgtcctcagcccaacttac

SEQ ID NO: 37131 - RNA, 22 nt, synthetic construct
  source 1..22: mol_type = other RNA
aggaaggccgtccattctcagg

SEQ ID NO: 37132 - RNA, 22 nt, synthetic construct
  source 1..22: mol_type = other RNA
aggccgtccattctcaggggtc

SEQ ID NO: 37133 - RNA, 22 nt, synthetic construct
  source 1..22: mol_type = other RNA
aggggtcactgcatgtttggac

SEQ ID NO: 37134 - RNA, 22 nt, synthetic construct
  source 1..22: mol_type = other RNA
agtccaaacatgcagtgacccc

SEQ ID NO: 37135 - RNA, 22 nt, synthetic construct
  source 1..22: mol_type = other RNA
agtctctgtgggcatgagcaca

SEQ ID NO: 37136 - RNA, 22 nt, synthetic construct
  source 1..22: mol_type = other RNA
agtgacccctgagaatggacgg

SEQ ID NO: 37137 - RNA, 22 nt, synthetic construct
  source 1..22: mol_type = other RNA
agtgccgtctgggtctgaagga

SEQ ID NO: 37138 - RNA, 22 nt, synthetic construct
  source 1..22: mol_type = other RNA
agttgggctgaggacagcttag

SEQ ID NO: 37139 - RNA, 22 nt, synthetic construct
  source 1..22: mol_type = other RNA
ataaaagtgtgtgtgaatgcga

SEQ ID NO: 37140 - RNA, 22 nt, synthetic construct
  source 1..22: mol_type = other RNA
atatgaacacagagcaccagag

SEQ ID NO: 37141 - RNA, 22 nt, synthetic construct
  source 1..22: mol_type = other RNA
atctgaaaaataaaagtgtgtg

SEQ ID NO: 37142 - RNA, 22 nt, synthetic construct
  source 1..22: mol_type = other RNA
atgaacacagagcaccagagtg

SEQ ID NO: 37143 - RNA, 22 nt, synthetic construct
  source 1..22: mol_type = other RNA
atgagcacagaagtccaaacat

SEQ ID NO: 37144 - RNA, 22 nt, synthetic construct
  source 1..22: mol_type = other RNA
atgcagaatggcagcacattgg

SEQ ID NO: 37145 - RNA, 22 nt, synthetic construct
  source 1..22: mol_type = other RNA
atgcagtgacccctgagaatgg

SEQ ID NO: 37146 - RNA, 22 nt, synthetic construct
  source 1..22: mol_type = other RNA
atgcccacagagacttgcacaa

SEQ ID NO: 37147 - RNA, 22 nt, synthetic construct
  source 1..22: mol_type = other RNA
atggacggccttccttcagacc

SEQ ID NO: 37148 - RNA, 22 nt, synthetic construct
  source 1..22: mol_type = other RNA
atggcagcacattggtaagttg

SEQ ID NO: 37149 - RNA, 22 nt, synthetic construct
  source 1..22: mol_type = other RNA
atgtgctgccattctgcatgtt

SEQ ID NO: 37150 - RNA, 22 nt, synthetic construct
  source 1..22: mol_type = other RNA
atgttgtgcaagtctctgtggg

SEQ ID NO: 37151 - RNA, 22 nt, synthetic construct
  source 1..22: mol_type = other RNA
atgtttggacttctgtgctcat

SEQ ID NO: 37152 - RNA, 22 nt, synthetic construct
  source 1..22: mol_type = other RNA
attctcaggggtcactgcatgt

SEQ ID NO: 37153 - RNA, 22 nt, synthetic construct
  source 1..22: mol_type = other RNA
attctgcatgttgtgcaagtct

SEQ ID NO: 37154 - RNA, 22 nt, synthetic construct
  source 1..22: mol_type = other RNA
attgaatatgaacacagagcac

SEQ ID NO: 37155 - RNA, 22 nt, synthetic construct
  source 1..22: mol_type = other RNA
attggtaagttgggctgaggac

SEQ ID NO: 37156 - RNA, 22 nt, synthetic construct
  source 1..22: mol_type = other RNA
caaacatgcagtgacccctgag

SEQ ID NO: 37157 - RNA, 22 nt, synthetic construct
  source 1..22: mol_type = other RNA
caacagctgctaagctgtcctc

SEQ ID NO: 37158 - RNA, 22 nt, synthetic construct
  source 1..22: mol_type = other RNA
caacatgcagaatggcagcaca

SEQ ID NO: 37159 - RNA, 22 nt, synthetic construct
  source 1..22: mol_type = other RNA
caacttaccaatgtgctgccat

SEQ ID NO: 37160 - RNA, 22 nt, synthetic construct
  source 1..22: mol_type = other RNA
caagtctctgtgggcatgagca

SEQ ID NO: 37161 - RNA, 22 nt, synthetic construct
  source 1..22: mol_type = other RNA
caatctgaaaaataaaagtgtg

SEQ ID NO: 37162 - RNA, 22 nt, synthetic construct
  source 1..22: mol_type = other RNA
caatgtgctgccattctgcatg

SEQ ID NO: 37163 - RNA, 22 nt, synthetic construct
  source 1..22: mol_type = other RNA
cacaacatgcagaatggcagca

SEQ ID NO: 37164 - RNA, 22 nt, synthetic construct
  source 1..22: mol_type = other RNA
cacacacacttttatttttcag

SEQ ID NO: 37165 - RNA, 22 nt, synthetic construct
  source 1..22: mol_type = other RNA
cacacacttttatttttcagat

SEQ ID NO: 37166 - RNA, 22 nt, synthetic construct
  source 1..22: mol_type = other RNA
cacacttttatttttcagattg

SEQ ID NO: 37167 - RNA, 22 nt, synthetic construct
  source 1..22: mol_type = other RNA
cacagaagtccaaacatgcagt

SEQ ID NO: 37168 - RNA, 22 nt, synthetic construct
  source 1..22: mol_type = other RNA
cacagagacttgcacaacatgc

SEQ ID NO: 37169 - RNA, 22 nt, synthetic construct
  source 1..22: mol_type = other RNA
cacagagcaccagagtgccgtc

SEQ ID NO: 37170 - RNA, 22 nt, synthetic construct
  source 1..22: mol_type = other RNA
cacattggtaagttgggctgag

SEQ ID NO: 37171 - RNA, 22 nt, synthetic construct
  source 1..22: mol_type = other RNA
caccagagtgccgtctgggtct

SEQ ID NO: 37172 - RNA, 22 nt, synthetic construct
  source 1..22: mol_type = other RNA
cactctggtgctctgtgttcat

SEQ ID NO: 37173 - RNA, 22 nt, synthetic construct
  source 1..22: mol_type = other RNA
cactgcatgtttggacttctgt

SEQ ID NO: 37174 - RNA, 22 nt, synthetic construct
  source 1..22: mol_type = other RNA
cagaagtccaaacatgcagtga

SEQ ID NO: 37175 - RNA, 22 nt, synthetic construct
  source 1..22: mol_type = other RNA
cagaatggcagcacattggtaa

SEQ ID NO: 37176 - RNA, 22 nt, synthetic construct
  source 1..22: mol_type = other RNA
cagacccagacggcactctggt

SEQ ID NO: 37177 - RNA, 22 nt, synthetic construct
  source 1..22: mol_type = other RNA
cagacggcactctggtgctctg

SEQ ID NO: 37178 - RNA, 22 nt, synthetic construct
  source 1..22: mol_type = other RNA
cagagacttgcacaacatgcag

SEQ ID NO: 37179 - RNA, 22 nt, synthetic construct
  source 1..22: mol_type = other RNA
cagagcaccagagtgccgtctg

SEQ ID NO: 37180 - RNA, 22 nt, synthetic construct
  source 1..22: mol_type = other RNA
cagagtgccgtctgggtctgaa

SEQ ID NO: 37181 - RNA, 22 nt, synthetic construct
  source 1..22: mol_type = other RNA
cagattgaatatgaacacagag

SEQ ID NO: 37182 - RNA, 22 nt, synthetic construct
  source 1..22: mol_type = other RNA
cagcacattggtaagttgggct

SEQ ID NO: 37183 - RNA, 22 nt, synthetic construct
  source 1..22: mol_type = other RNA
cagcccaacttaccaatgtgct

SEQ ID NO: 37184 - RNA, 22 nt, synthetic construct
  source 1..22: mol_type = other RNA
cagctgctaagctgtcctcagc

SEQ ID NO: 37185 - RNA, 22 nt, synthetic construct
  source 1..22: mol_type = other RNA
caggggtcactgcatgtttgga

SEQ ID NO: 37186 - RNA, 22 nt, synthetic construct
  source 1..22: mol_type = other RNA
cagtgacccctgagaatggacg

SEQ ID NO: 37187 - RNA, 22 nt, synthetic construct
  source 1..22: mol_type = other RNA
catgagcacagaagtccaaaca

SEQ ID NO: 37188 - RNA, 22 nt, synthetic construct
  source 1..22: mol_type = other RNA
catgcagaatggcagcacattg

SEQ ID NO: 37189 - RNA, 22 nt, synthetic construct
  source 1..22: mol_type = other RNA
catgcagtgacccctgagaatg

SEQ ID NO: 37190 - RNA, 22 nt, synthetic construct
  source 1..22: mol_type = other RNA
catgcccacagagacttgcaca

SEQ ID NO: 37191 - RNA, 22 nt, synthetic construct
  source 1..22: mol_type = other RNA
catgttgtgcaagtctctgtgg

SEQ ID NO: 37192 - RNA, 22 nt, synthetic construct
  source 1..22: mol_type = other RNA
catgtttggacttctgtgctca

SEQ ID NO: 37193 - RNA, 22 nt, synthetic construct
  source 1..22: mol_type = other RNA
cattcacacacacttttatttt

SEQ ID NO: 37194 - RNA, 22 nt, synthetic construct
  source 1..22: mol_type = other RNA
cattctcaggggtcactgcatg

SEQ ID NO: 37195 - RNA, 22 nt, synthetic construct
  source 1..22: mol_type = other RNA
cattctgcatgttgtgcaagtc

SEQ ID NO: 37196 - RNA, 22 nt, synthetic construct
  source 1..22: mol_type = other RNA
cattggtaagttgggctgagga

SEQ ID NO: 37197 - RNA, 22 nt, synthetic construct
  source 1..22: mol_type = other RNA
ccaaacatgcagtgacccctga

SEQ ID NO: 37198 - RNA, 22 nt, synthetic construct
  source 1..22: mol_type = other RNA
ccaacttaccaatgtgctgcca

SEQ ID NO: 37199 - RNA, 22 nt, synthetic construct
  source 1..22: mol_type = other RNA
ccaatgtgctgccattctgcat

SEQ ID NO: 37200 - RNA, 22 nt, synthetic construct
  source 1..22: mol_type = other RNA
ccacagagacttgcacaacatg

SEQ ID NO: 37201 - RNA, 22 nt, synthetic construct
  source 1..22: mol_type = other RNA
ccagacggcactctggtgctct

SEQ ID NO: 37202 - RNA, 22 nt, synthetic construct
  source 1..22: mol_type = other RNA
ccagagtgccgtctgggtctga

SEQ ID NO: 37203 - RNA, 22 nt, synthetic construct
  source 1..22: mol_type = other RNA
ccattctcaggggtcactgcat

SEQ ID NO: 37204 - RNA, 22 nt, synthetic construct
  source 1..22: mol_type = other RNA
ccattctgcatgttgtgcaagt

SEQ ID NO: 37205 - RNA, 22 nt, synthetic construct
  source 1..22: mol_type = other RNA
cccaacttaccaatgtgctgcc

SEQ ID NO: 37206 - RNA, 22 nt, synthetic construct
  source 1..22: mol_type = other RNA
cccacagagacttgcacaacat

SEQ ID NO: 37207 - RNA, 22 nt, synthetic construct
  source 1..22: mol_type = other RNA
cccagacggcactctggtgctc

SEQ ID NO: 37208 - RNA, 22 nt, synthetic construct
  source 1..22: mol_type = other RNA
cccctgagaatggacggccttc

SEQ ID NO: 37209 - RNA, 22 nt, synthetic construct
  source 1..22: mol_type = other RNA
ccctgagaatggacggccttcc

SEQ ID NO: 37210 - RNA, 22 nt, synthetic construct
  source 1..22: mol_type = other RNA
ccgtccattctcaggggtcact

SEQ ID NO: 37211 - RNA, 22 nt, synthetic construct
  source 1..22: mol_type = other RNA
ccgtctgggtctgaaggaaggc

SEQ ID NO: 37212 - RNA, 22 nt, synthetic construct
  source 1..22: mol_type = other RNA
cctcagcccaacttaccaatgt

SEQ ID NO: 37213 - RNA, 22 nt, synthetic construct
  source 1..22: mol_type = other RNA
cctgagaatggacggccttcct

SEQ ID NO: 37214 - RNA, 22 nt, synthetic construct
  source 1..22: mol_type = other RNA
ccttcagacccagacggcactc

SEQ ID NO: 37215 - RNA, 22 nt, synthetic construct
  source 1..22: mol_type = other RNA
ccttccttcagacccagacggc

SEQ ID NO: 37216 - RNA, 22 nt, synthetic construct
  source 1..22: mol_type = other RNA
cgcattcacacacacttttatt

SEQ ID NO: 37217 - RNA, 22 nt, synthetic construct
  source 1..22: mol_type = other RNA
cggcactctggtgctctgtgtt

SEQ ID NO: 37218 - RNA, 22 nt, synthetic construct
  source 1..22: mol_type = other RNA
cggccttccttcagacccagac

SEQ ID NO: 37219 - RNA, 22 nt, synthetic construct
  source 1..22: mol_type = other RNA
cgtccattctcaggggtcactg

SEQ ID NO: 37220 - RNA, 22 nt, synthetic construct
  source 1..22: mol_type = other RNA
cgtctgggtctgaaggaaggcc

SEQ ID NO: 37221 - RNA, 22 nt, synthetic construct
  source 1..22: mol_type = other RNA
ctaactactttcgcattcacac

SEQ ID NO: 37222 - RNA, 22 nt, synthetic construct
  source 1..22: mol_type = other RNA
ctaagctgtcctcagcccaact

SEQ ID NO: 37223 - RNA, 22 nt, synthetic construct
  source 1..22: mol_type = other RNA
ctactttcgcattcacacacac

SEQ ID NO: 37224 - RNA, 22 nt, synthetic construct
  source 1..22: mol_type = other RNA
ctcaacagctgctaagctgtcc

SEQ ID NO: 37225 - RNA, 22 nt, synthetic construct
  source 1..22: mol_type = other RNA
ctcagcccaacttaccaatgtg

SEQ ID NO: 37226 - RNA, 22 nt, synthetic construct
  source 1..22: mol_type = other RNA
ctcaggggtcactgcatgtttg

SEQ ID NO: 37227 - RNA, 22 nt, synthetic construct
  source 1..22: mol_type = other RNA
ctcatgcccacagagacttgca

SEQ ID NO: 37228 - RNA, 22 nt, synthetic construct
  source 1..22: mol_type = other RNA
ctctggtgctctgtgttcatat

SEQ ID NO: 37229 - RNA, 22 nt, synthetic construct
  source 1..22: mol_type = other RNA
ctctgtgggcatgagcacagaa

SEQ ID NO: 37230 - RNA, 22 nt, synthetic construct
  source 1..22: mol_type = other RNA
ctctgtgttcatattcaatctg

SEQ ID NO: 37231 - RNA, 22 nt, synthetic construct
  source 1..22: mol_type = other RNA
ctgaaaaataaaagtgtgtgtg

SEQ ID NO: 37232 - RNA, 22 nt, synthetic construct
  source 1..22: mol_type = other RNA
ctgaaggaaggccgtccattct

SEQ ID NO: 37233 - RNA, 22 nt, synthetic construct
  source 1..22: mol_type = other RNA
ctgagaatggacggccttcctt

SEQ ID NO: 37234 - RNA, 22 nt, synthetic construct
  source 1..22: mol_type = other RNA
ctgcatgttgtgcaagtctctg

SEQ ID NO: 37235 - RNA, 22 nt, synthetic construct
  source 1..22: mol_type = other RNA
ctgcatgtttggacttctgtgc

SEQ ID NO: 37236 - RNA, 22 nt, synthetic construct
  source 1..22: mol_type = other RNA
ctgccattctgcatgttgtgca

SEQ ID NO: 37237 - RNA, 22 nt, synthetic construct
  source 1..22: mol_type = other RNA
ctgctaagctgtcctcagccca

SEQ ID NO: 37238 - RNA, 22 nt, synthetic construct
  source 1..22: mol_type = other RNA
ctgggtctgaaggaaggccgtc

SEQ ID NO: 37239 - RNA, 22 nt, synthetic construct
  source 1..22: mol_type = other RNA
ctggtgctctgtgttcatattc

SEQ ID NO: 37240 - RNA, 22 nt, synthetic construct
  source 1..22: mol_type = other RNA
ctgtcctcagcccaacttacca

SEQ ID NO: 37241 - RNA, 22 nt, synthetic construct
  source 1..22: mol_type = other RNA
ctgtgctcatgcccacagagac

SEQ ID NO: 37242 - RNA, 22 nt, synthetic construct
  source 1..22: mol_type = other RNA
ctgtgggcatgagcacagaagt

SEQ ID NO: 37243 - RNA, 22 nt, synthetic construct
  source 1..22: mol_type = other RNA
ctgtgttcatattcaatctgaa

SEQ ID NO: 37244 - RNA, 22 nt, synthetic construct
  source 1..22: mol_type = other RNA
cttaccaatgtgctgccattct

SEQ ID NO: 37245 - RNA, 22 nt, synthetic construct
  source 1..22: mol_type = other RNA
cttcagacccagacggcactct

SEQ ID NO: 37246 - RNA, 22 nt, synthetic construct
  source 1..22: mol_type = other RNA
cttccttcagacccagacggca

SEQ ID NO: 37247 - RNA, 22 nt, synthetic construct
  source 1..22: mol_type = other RNA
cttctgtgctcatgcccacaga

SEQ ID NO: 37248 - RNA, 22 nt, synthetic construct
  source 1..22: mol_type = other RNA
cttgcacaacatgcagaatggc

SEQ ID NO: 37249 - RNA, 22 nt, synthetic construct
  source 1..22: mol_type = other RNA
ctttcgcattcacacacacttt

SEQ ID NO: 37250 - RNA, 22 nt, synthetic construct
  source 1..22: mol_type = other RNA
gaaaaataaaagtgtgtgtgaa

SEQ ID NO: 37251 - RNA, 22 nt, synthetic construct
  source 1..22: mol_type = other RNA
gaacacagagcaccagagtgcc

SEQ ID NO: 37252 - RNA, 22 nt, synthetic construct
  source 1..22: mol_type = other RNA
gaaggaaggccgtccattctca

SEQ ID NO: 37253 - RNA, 22 nt, synthetic construct
  source 1..22: mol_type = other RNA
gaaggccgtccattctcagggg

SEQ ID NO: 37254 - RNA, 22 nt, synthetic construct
  source 1..22: mol_type = other RNA
gaagtccaaacatgcagtgacc

SEQ ID NO: 37255 - RNA, 22 nt, synthetic construct
  source 1..22: mol_type = other RNA
gaatatgaacacagagcaccag

SEQ ID NO: 37256 - RNA, 22 nt, synthetic construct
  source 1..22: mol_type = other RNA
gaatggacggccttccttcaga

SEQ ID NO: 37257 - RNA, 22 nt, synthetic construct
  source 1..22: mol_type = other RNA
gaatggcagcacattggtaagt

SEQ ID NO: 37258 - RNA, 22 nt, synthetic construct
  source 1..22: mol_type = other RNA
gacccagacggcactctggtgc

SEQ ID NO: 37259 - RNA, 22 nt, synthetic construct
  source 1..22: mol_type = other RNA
gacccctgagaatggacggcct

SEQ ID NO: 37260 - RNA, 22 nt, synthetic construct
  source 1..22: mol_type = other RNA
gacggcactctggtgctctgtg

SEQ ID NO: 37261 - RNA, 22 nt, synthetic construct
  source 1..22: mol_type = other RNA
gacggccttccttcagacccag

SEQ ID NO: 37262 - RNA, 22 nt, synthetic construct
  source 1..22: mol_type = other RNA
gactcaacagctgctaagctgt

SEQ ID NO: 37263 - RNA, 22 nt, synthetic construct
  source 1..22: mol_type = other RNA
gacttctgtgctcatgcccaca

SEQ ID NO: 37264 - RNA, 22 nt, synthetic construct
  source 1..22: mol_type = other RNA
gacttgcacaacatgcagaatg

SEQ ID NO: 37265 - RNA, 22 nt, synthetic construct
  source 1..22: mol_type = other RNA
gagaatggacggccttccttca

SEQ ID NO: 37266 - RNA, 22 nt, synthetic construct
  source 1..22: mol_type = other RNA
gagacttgcacaacatgcagaa

SEQ ID NO: 37267 - RNA, 22 nt, synthetic construct
  source 1..22: mol_type = other RNA
gagcacagaagtccaaacatgc

SEQ ID NO: 37268 - RNA, 22 nt, synthetic construct
  source 1..22: mol_type = other RNA
gagcaccagagtgccgtctggg

SEQ ID NO: 37269 - RNA, 22 nt, synthetic construct
  source 1..22: mol_type = other RNA
gagtgccgtctgggtctgaagg

SEQ ID NO: 37270 - RNA, 22 nt, synthetic construct
  source 1..22: mol_type = other RNA
gattgaatatgaacacagagca

SEQ ID NO: 37271 - RNA, 22 nt, synthetic construct
  source 1..22: mol_type = other RNA
gcaagtctctgtgggcatgagc

SEQ ID NO: 37272 - RNA, 22 nt, synthetic construct
  source 1..22: mol_type = other RNA
gcacaacatgcagaatggcagc

SEQ ID NO: 37273 - RNA, 22 nt, synthetic construct
  source 1..22: mol_type = other RNA
gcacagaagtccaaacatgcag

SEQ ID NO: 37274 - RNA, 22 nt, synthetic construct
  source 1..22: mol_type = other RNA
gcacattggtaagttgggctga

SEQ ID NO: 37275 - RNA, 22 nt, synthetic construct
  source 1..22: mol_type = other RNA
gcaccagagtgccgtctgggtc

SEQ ID NO: 37276 - RNA, 22 nt, synthetic construct
  source 1..22: mol_type = other RNA
gcactctggtgctctgtgttca

SEQ ID NO: 37277 - RNA, 22 nt, synthetic construct
  source 1..22: mol_type = other RNA
gcagaatggcagcacattggta

SEQ ID NO: 37278 - RNA, 22 nt, synthetic construct
  source 1..22: mol_type = other RNA
gcagcacattggtaagttgggc

SEQ ID NO: 37279 - RNA, 22 nt, synthetic construct
  source 1..22: mol_type = other RNA
gcagtgacccctgagaatggac

SEQ ID NO: 37280 - RNA, 22 nt, synthetic construct
  source 1..22: mol_type = other RNA
gcatgagcacagaagtccaaac

SEQ ID NO: 37281 - RNA, 22 nt, synthetic construct
  source 1..22: mol_type = other RNA
gcatgttgtgcaagtctctgtg

SEQ ID NO: 37282 - RNA, 22 nt, synthetic construct
  source 1..22: mol_type = other RNA
gcatgtttggacttctgtgctc

SEQ ID NO: 37283 - RNA, 22 nt, synthetic construct
  source 1..22: mol_type = other RNA
gcattcacacacacttttattt

SEQ ID NO: 37284 - RNA, 22 nt, synthetic construct
  source 1..22: mol_type = other RNA
gccattctgcatgttgtgcaag

SEQ ID NO: 37285 - RNA, 22 nt, synthetic construct
  source 1..22: mol_type = other RNA
gcccaacttaccaatgtgctgc

SEQ ID NO: 37286 - RNA, 22 nt, synthetic construct
  source 1..22: mol_type = other RNA
gcccacagagacttgcacaaca

SEQ ID NO: 37287 - RNA, 22 nt, synthetic construct
  source 1..22: mol_type = other RNA
gccgtccattctcaggggtcac

SEQ ID NO: 37288 - RNA, 22 nt, synthetic construct
  source 1..22: mol_type = other RNA
gccgtctgggtctgaaggaagg

SEQ ID NO: 37289 - RNA, 22 nt, synthetic construct
  source 1..22: mol_type = other RNA
gccttccttcagacccagacgg

SEQ ID NO: 37290 - RNA, 22 nt, synthetic construct
  source 1..22: mol_type = other RNA
gctaagctgtcctcagcccaac

SEQ ID NO: 37291 - RNA, 22 nt, synthetic construct
  source 1..22: mol_type = other RNA
gctcatgcccacagagacttgc

SEQ ID NO: 37292 - RNA, 22 nt, synthetic construct
  source 1..22: mol_type = other RNA
gctctgtgttcatattcaatct

SEQ ID NO: 37293 - RNA, 22 nt, synthetic construct
  source 1..22: mol_type = other RNA
gctgccattctgcatgttgtgc

SEQ ID NO: 37294 - RNA, 22 nt, synthetic construct
  source 1..22: mol_type = other RNA
gctgctaagctgtcctcagccc

SEQ ID NO: 37295 - RNA, 22 nt, synthetic construct
  source 1..22: mol_type = other RNA
gctgtcctcagcccaacttacc

SEQ ID NO: 37296 - RNA, 22 nt, synthetic construct
  source 1..22: mol_type = other RNA
ggaaggccgtccattctcaggg

SEQ ID NO: 37297 - RNA, 22 nt, synthetic construct
  source 1..22: mol_type = other RNA
ggacggccttccttcagaccca

SEQ ID NO: 37298 - RNA, 22 nt, synthetic construct
  source 1..22: mol_type = other RNA
ggacttctgtgctcatgcccac

SEQ ID NO: 37299 - RNA, 22 nt, synthetic construct
  source 1..22: mol_type = other RNA
ggcactctggtgctctgtgttc

SEQ ID NO: 37300 - RNA, 22 nt, synthetic construct
  source 1..22: mol_type = other RNA
ggcagcacattggtaagttggg

SEQ ID NO: 37301 - RNA, 22 nt, synthetic construct
  source 1..22: mol_type = other RNA
ggcatgagcacagaagtccaaa

SEQ ID NO: 37302 - RNA, 22 nt, synthetic construct
  source 1..22: mol_type = other RNA
ggccgtccattctcaggggtca

SEQ ID NO: 37303 - RNA, 22 nt, synthetic construct
  source 1..22: mol_type = other RNA
ggccttccttcagacccagacg

SEQ ID NO: 37304 - RNA, 22 nt, synthetic construct
  source 1..22: mol_type = other RNA
ggctgaggacagcttagcagct

SEQ ID NO: 37305 - RNA, 22 nt, synthetic construct
  source 1..22: mol_type = other RNA
gggcatgagcacagaagtccaa

SEQ ID NO: 37306 - RNA, 22 nt, synthetic construct
  source 1..22: mol_type = other RNA
gggctgaggacagcttagcagc

SEQ ID NO: 37307 - RNA, 22 nt, synthetic construct
  source 1..22: mol_type = other RNA
ggggtcactgcatgtttggact

SEQ ID NO: 37308 - RNA, 22 nt, synthetic construct
  source 1..22: mol_type = other RNA
gggtcactgcatgtttggactt

SEQ ID NO: 37309 - RNA, 22 nt, synthetic construct
  source 1..22: mol_type = other RNA
gggtctgaaggaaggccgtcca

SEQ ID NO: 37310 - RNA, 22 nt, synthetic construct
  source 1..22: mol_type = other RNA
ggtaagttgggctgaggacagc

SEQ ID NO: 37311 - RNA, 22 nt, synthetic construct
  source 1..22: mol_type = other RNA
ggtcactgcatgtttggacttc

SEQ ID NO: 37312 - RNA, 22 nt, synthetic construct
  source 1..22: mol_type = other RNA
ggtctgaaggaaggccgtccat

SEQ ID NO: 37313 - RNA, 22 nt, synthetic construct
  source 1..22: mol_type = other RNA
ggtgctctgtgttcatattcaa

SEQ ID NO: 37314 - RNA, 22 nt, synthetic construct
  source 1..22: mol_type = other RNA
gtaagttgggctgaggacagct

SEQ ID NO: 37315 - RNA, 22 nt, synthetic construct
  source 1..22: mol_type = other RNA
gtcactgcatgtttggacttct

SEQ ID NO: 37316 - RNA, 22 nt, synthetic construct
  source 1..22: mol_type = other RNA
gtccaaacatgcagtgacccct

SEQ ID NO: 37317 - RNA, 22 nt, synthetic construct
  source 1..22: mol_type = other RNA
gtccattctcaggggtcactgc

SEQ ID NO: 37318 - RNA, 22 nt, synthetic construct
  source 1..22: mol_type = other RNA
gtcctcagcccaacttaccaat

SEQ ID NO: 37319 - RNA, 22 nt, synthetic construct
  source 1..22: mol_type = other RNA
gtctctgtgggcatgagcacag

SEQ ID NO: 37320 - RNA, 22 nt, synthetic construct
  source 1..22: mol_type = other RNA
gtctgaaggaaggccgtccatt

SEQ ID NO: 37321 - RNA, 22 nt, synthetic construct
  source 1..22: mol_type = other RNA
gtctgggtctgaaggaaggccg

SEQ ID NO: 37322 - RNA, 22 nt, synthetic construct
  source 1..22: mol_type = other RNA
gtgacccctgagaatggacggc

SEQ ID NO: 37323 - RNA, 22 nt, synthetic construct
  source 1..22: mol_type = other RNA
gtgcaagtctctgtgggcatga

SEQ ID NO: 37324 - RNA, 22 nt, synthetic construct
  source 1..22: mol_type = other RNA
gtgccgtctgggtctgaaggaa

SEQ ID NO: 37325 - RNA, 22 nt, synthetic construct
  source 1..22: mol_type = other RNA
gtgctcatgcccacagagactt

SEQ ID NO: 37326 - RNA, 22 nt, synthetic construct
  source 1..22: mol_type = other RNA
gtgctctgtgttcatattcaat

SEQ ID NO: 37327 - RNA, 22 nt, synthetic construct
  source 1..22: mol_type = other RNA
gtgctgccattctgcatgttgt

SEQ ID NO: 37328 - RNA, 22 nt, synthetic construct
  source 1..22: mol_type = other RNA
gtgggcatgagcacagaagtcc

SEQ ID NO: 37329 - RNA, 22 nt, synthetic construct
  source 1..22: mol_type = other RNA
gtgttcatattcaatctgaaaa

SEQ ID NO: 37330 - RNA, 22 nt, synthetic construct
  source 1..22: mol_type = other RNA
gttgggctgaggacagcttagc

SEQ ID NO: 37331 - RNA, 22 nt, synthetic construct
  source 1..22: mol_type = other RNA
gttgtgcaagtctctgtgggca

SEQ ID NO: 37332 - RNA, 22 nt, synthetic construct
  source 1..22: mol_type = other RNA
gtttggacttctgtgctcatgc

SEQ ID NO: 37333 - RNA, 22 nt, synthetic construct
  source 1..22: mol_type = other RNA
taaaagtgtgtgtgaatgcgaa

SEQ ID NO: 37334 - RNA, 22 nt, synthetic construct
  source 1..22: mol_type = other RNA
taactactttcgcattcacaca

SEQ ID NO: 37335 - RNA, 22 nt, synthetic construct
  source 1..22: mol_type = other RNA
taagctgtcctcagcccaactt

SEQ ID NO: 37336 - RNA, 22 nt, synthetic construct
  source 1..22: mol_type = other RNA
taagttgggctgaggacagctt

SEQ ID NO: 37337 - RNA, 22 nt, synthetic construct
  source 1..22: mol_type = other RNA
taccaatgtgctgccattctgc

SEQ ID NO: 37338 - RNA, 22 nt, synthetic construct
  source 1..22: mol_type = other RNA
tactttcgcattcacacacact

SEQ ID NO: 37339 - RNA, 22 nt, synthetic construct
  source 1..22: mol_type = other RNA
tatgaacacagagcaccagagt

SEQ ID NO: 37340 - RNA, 22 nt, synthetic construct
  source 1..22: mol_type = other RNA
tcaacagctgctaagctgtcct

SEQ ID NO: 37341 - RNA, 22 nt, synthetic construct
  source 1..22: mol_type = other RNA
tcacacacacttttatttttca

SEQ ID NO: 37342 - RNA, 22 nt, synthetic construct
  source 1..22: mol_type = other RNA
tcactgcatgtttggacttctg

SEQ ID NO: 37343 - RNA, 22 nt, synthetic construct
  source 1..22: mol_type = other RNA
tcagacccagacggcactctgg

SEQ ID NO: 37344 - RNA, 22 nt, synthetic construct
  source 1..22: mol_type = other RNA
tcagattgaatatgaacacaga

SEQ ID NO: 37345 - RNA, 22 nt, synthetic construct
  source 1..22: mol_type = other RNA
tcagcccaacttaccaatgtgc

SEQ ID NO: 37346 - RNA, 22 nt, synthetic construct
  source 1..22: mol_type = other RNA
tcaggggtcactgcatgtttgg

SEQ ID NO: 37347 - RNA, 22 nt, synthetic construct
  source 1..22: mol_type = other RNA
tcatgcccacagagacttgcac

SEQ ID NO: 37348 - RNA, 22 nt, synthetic construct
  source 1..22: mol_type = other RNA
tccaaacatgcagtgacccctg

SEQ ID NO: 37349 - RNA, 22 nt, synthetic construct
  source 1..22: mol_type = other RNA
tccattctcaggggtcactgca

SEQ ID NO: 37350 - RNA, 22 nt, synthetic construct
  source 1..22: mol_type = other RNA
tcctcagcccaacttaccaatg

SEQ ID NO: 37351 - RNA, 22 nt, synthetic construct
  source 1..22: mol_type = other RNA
tccttcagacccagacggcact

SEQ ID NO: 37352 - RNA, 22 nt, synthetic construct
  source 1..22: mol_type = other RNA
tcgcattcacacacacttttat

SEQ ID NO: 37353 - RNA, 22 nt, synthetic construct
  source 1..22: mol_type = other RNA
tctcaggggtcactgcatgttt

SEQ ID NO: 37354 - RNA, 22 nt, synthetic construct
  source 1..22: mol_type = other RNA
tctctgtgggcatgagcacaga

SEQ ID NO: 37355 - RNA, 22 nt, synthetic construct
  source 1..22: mol_type = other RNA
tctgaaaaataaaagtgtgtgt

SEQ ID NO: 37356 - RNA, 22 nt, synthetic construct
  source 1..22: mol_type = other RNA
tctgaaggaaggccgtccattc

SEQ ID NO: 37357 - RNA, 22 nt, synthetic construct
  source 1..22: mol_type = other RNA
tctgcatgttgtgcaagtctct

SEQ ID NO: 37358 - RNA, 22 nt, synthetic construct
  source 1..22: mol_type = other RNA
tctgggtctgaaggaaggccgt

SEQ ID NO: 37359 - RNA, 22 nt, synthetic construct
  source 1..22: mol_type = other RNA
tctggtgctctgtgttcatatt

SEQ ID NO: 37360 - RNA, 22 nt, synthetic construct
  source 1..22: mol_type = other RNA
tctgtgctcatgcccacagaga

SEQ ID NO: 37361 - RNA, 22 nt, synthetic construct
  source 1..22: mol_type = other RNA
tctgtgggcatgagcacagaag

SEQ ID NO: 37362 - RNA, 22 nt, synthetic construct
  source 1..22: mol_type = other RNA
tctgtgttcatattcaatctga

SEQ ID NO: 37363 - RNA, 22 nt, synthetic construct
  source 1..22: mol_type = other RNA
tgaaaaataaaagtgtgtgtga

SEQ ID NO: 37364 - RNA, 22 nt, synthetic construct
  source 1..22: mol_type = other RNA
tgaacacagagcaccagagtgc

SEQ ID NO: 37365 - RNA, 22 nt, synthetic construct
  source 1..22: mol_type = other RNA
tgaaggaaggccgtccattctc

SEQ ID NO: 37366 - RNA, 22 nt, synthetic construct
  source 1..22: mol_type = other RNA
tgaatatgaacacagagcacca

SEQ ID NO: 37367 - RNA, 22 nt, synthetic construct
  source 1..22: mol_type = other RNA
tgacccctgagaatggacggcc

SEQ ID NO: 37368 - RNA, 22 nt, synthetic construct
  source 1..22: mol_type = other RNA
tgagaatggacggccttccttc

SEQ ID NO: 37369 - RNA, 22 nt, synthetic construct
  source 1..22: mol_type = other RNA
tgagcacagaagtccaaacatg

SEQ ID NO: 37370 - RNA, 22 nt, synthetic construct
  source 1..22: mol_type = other RNA
tgcaagtctctgtgggcatgag

SEQ ID NO: 37371 - RNA, 22 nt, synthetic construct
  source 1..22: mol_type = other RNA
tgcacaacatgcagaatggcag

SEQ ID NO: 37372 - RNA, 22 nt, synthetic construct
  source 1..22: mol_type = other RNA
tgcagaatggcagcacattggt

SEQ ID NO: 37373 - RNA, 22 nt, synthetic construct
  source 1..22: mol_type = other RNA
tgcagtgacccctgagaatgga

SEQ ID NO: 37374 - RNA, 22 nt, synthetic construct
  source 1..22: mol_type = other RNA
tgcatgttgtgcaagtctctgt

SEQ ID NO: 37375 - RNA, 22 nt, synthetic construct
  source 1..22: mol_type = other RNA
tgcatgtttggacttctgtgct

SEQ ID NO: 37376 - RNA, 22 nt, synthetic construct
  source 1..22: mol_type = other RNA
tgccattctgcatgttgtgcaa

SEQ ID NO: 37377 - RNA, 22 nt, synthetic construct
  source 1..22: mol_type = other RNA
tgcccacagagacttgcacaac

SEQ ID NO: 37378 - RNA, 22 nt, synthetic construct
  source 1..22: mol_type = other RNA
tgccgtctgggtctgaaggaag

SEQ ID NO: 37379 - RNA, 22 nt, synthetic construct
  source 1..22: mol_type = other RNA
tgctaagctgtcctcagcccaa

SEQ ID NO: 37380 - RNA, 22 nt, synthetic construct
  source 1..22: mol_type = other RNA
tgctcatgcccacagagacttg

SEQ ID NO: 37381 - RNA, 22 nt, synthetic construct
  source 1..22: mol_type = other RNA
tgctctgtgttcatattcaatc

SEQ ID NO: 37382 - RNA, 22 nt, synthetic construct
  source 1..22: mol_type = other RNA
tgctgccattctgcatgttgtg

SEQ ID NO: 37383 - RNA, 22 nt, synthetic construct
  source 1..22: mol_type = other RNA
tggacggccttccttcagaccc

SEQ ID NO: 37384 - RNA, 22 nt, synthetic construct
  source 1..22: mol_type = other RNA
tggacttctgtgctcatgccca

SEQ ID NO: 37385 - RNA, 22 nt, synthetic construct
  source 1..22: mol_type = other RNA
tggcagcacattggtaagttgg

SEQ ID NO: 37386 - RNA, 22 nt, synthetic construct
  source 1..22: mol_type = other RNA
tgggcatgagcacagaagtcca

SEQ ID NO: 37387 - RNA, 22 nt, synthetic construct
  source 1..22: mol_type = other RNA
tgggctgaggacagcttagcag

SEQ ID NO: 37388 - RNA, 22 nt, synthetic construct
  source 1..22: mol_type = other RNA
tgggtctgaaggaaggccgtcc

SEQ ID NO: 37389 - RNA, 22 nt, synthetic construct
  source 1..22: mol_type = other RNA
tggtaagttgggctgaggacag

SEQ ID NO: 37390 - RNA, 22 nt, synthetic construct
  source 1..22: mol_type = other RNA
tggtgctctgtgttcatattca

SEQ ID NO: 37391 - RNA, 22 nt, synthetic construct
  source 1..22: mol_type = other RNA
tgtcctcagcccaacttaccaa

SEQ ID NO: 37392 - RNA, 22 nt, synthetic construct
  source 1..22: mol_type = other RNA
tgtgcaagtctctgtgggcatg

SEQ ID NO: 37393 - RNA, 22 nt, synthetic construct
  source 1..22: mol_type = other RNA
tgtgctcatgcccacagagact

SEQ ID NO: 37394 - RNA, 22 nt, synthetic construct
  source 1..22: mol_type = other RNA
tgtgctgccattctgcatgttg

SEQ ID NO: 37395 - RNA, 22 nt, synthetic construct
  source 1..22: mol_type = other RNA
tgtgggcatgagcacagaagtc

SEQ ID NO: 37396 - RNA, 22 nt, synthetic construct
  source 1..22: mol_type = other RNA
tgtgttcatattcaatctgaaa

SEQ ID NO: 37397 - RNA, 22 nt, synthetic construct
  source 1..22: mol_type = other RNA
tgttgtgcaagtctctgtgggc

SEQ ID NO: 37398 - RNA, 22 nt, synthetic construct
  source 1..22: mol_type = other RNA
tgtttggacttctgtgctcatg

SEQ ID NO: 37399 - RNA, 22 nt, synthetic construct
  source 1..22: mol_type = other RNA
ttaccaatgtgctgccattctg

SEQ ID NO: 37400 - RNA, 22 nt, synthetic construct
  source 1..22: mol_type = other RNA
ttcacacacacttttatttttc

SEQ ID NO: 37401 - RNA, 22 nt, synthetic construct
  source 1..22: mol_type = other RNA
ttcagacccagacggcactctg

SEQ ID NO: 37402 - RNA, 22 nt, synthetic construct
  source 1..22: mol_type = other RNA
ttcagattgaatatgaacacag

SEQ ID NO: 37403 - RNA, 22 nt, synthetic construct
  source 1..22: mol_type = other RNA
ttccttcagacccagacggcac

SEQ ID NO: 37404 - RNA, 22 nt, synthetic construct
  source 1..22: mol_type = other RNA
ttcgcattcacacacactttta

SEQ ID NO: 37405 - RNA, 22 nt, synthetic construct
  source 1..22: mol_type = other RNA
ttctcaggggtcactgcatgtt

SEQ ID NO: 37406 - RNA, 22 nt, synthetic construct
  source 1..22: mol_type = other RNA
ttctgcatgttgtgcaagtctc

SEQ ID NO: 37407 - RNA, 22 nt, synthetic construct
  source 1..22: mol_type = other RNA
ttctgtgctcatgcccacagag

SEQ ID NO: 37408 - RNA, 22 nt, synthetic construct
  source 1..22: mol_type = other RNA
ttgaatatgaacacagagcacc

SEQ ID NO: 37409 - RNA, 22 nt, synthetic construct
  source 1..22: mol_type = other RNA
ttgcacaacatgcagaatggca

SEQ ID NO: 37410 - RNA, 22 nt, synthetic construct
  source 1..22: mol_type = other RNA
ttggacttctgtgctcatgccc

SEQ ID NO: 37411 - RNA, 22 nt, synthetic construct
  source 1..22: mol_type = other RNA
ttgggctgaggacagcttagca

SEQ ID NO: 37412 - RNA, 22 nt, synthetic construct
  source 1..22: mol_type = other RNA
ttggtaagttgggctgaggaca

SEQ ID NO: 37413 - RNA, 22 nt, synthetic construct
  source 1..22: mol_type = other RNA
ttgtgcaagtctctgtgggcat

SEQ ID NO: 37414 - RNA, 22 nt, synthetic construct
  source 1..22: mol_type = other RNA
tttcagattgaatatgaacaca

SEQ ID NO: 37415 - RNA, 22 nt, synthetic construct
  source 1..22: mol_type = other RNA
tttcgcattcacacacactttt

SEQ ID NO: 37416 - RNA, 22 nt, synthetic construct
  source 1..22: mol_type = other RNA
tttggacttctgtgctcatgcc

SEQ ID NO: 37417 - RNA, 22 nt, synthetic construct
  source 1..22: mol_type = other RNA
ttttcagattgaatatgaacac

SEQ ID NO: 37418 - RNA, 22 nt, synthetic construct
  source 1..22: mol_type = other RNA
taggatttgttagaaaggagac

SEQ ID NO: 37419 - RNA, 22 nt, synthetic construct
  source 1..22: mol_type = other RNA
ttgttagaaaggagacccgact

SEQ ID NO: 37420 - RNA, 22 nt, synthetic construct
  source 1..22: mol_type = other RNA
ccatctcctgcttccaagcgtt

SEQ ID NO: 37421 - RNA, 22 nt, synthetic construct
  source 1..22: mol_type = other RNA
ttgtttccatgctctttagaat

SEQ ID NO: 37422 - RNA, 20 nt, synthetic construct
  source 1..20: mol_type = other RNA
aaaaaaatgtacttggttcc

SEQ ID NO: 37423 - RNA, 17 nt, synthetic construct
  source 1..17: mol_type = other RNA
aaaatgtacttggttcc

SEQ ID NO: 37424 - RNA, 17 nt, synthetic construct
  source 1..17: mol_type = other RNA
aaaaatgtacttggttc

SEQ ID NO: 37425 - RNA, 17 nt, synthetic construct
  source 1..17: mol_type = other RNA
aaaaaatgtacttggtt

SEQ ID NO: 37426 - RNA, 17 nt, synthetic construct
  source 1..17: mol_type = other RNA
aaaaaaatgtacttggt

SEQ ID NO: 37427 - protein, 1348 aa, synthetic construct
MSIKSDYFLGLDIGTDSIGWAVTDPEYHILRRKGKALWGIRLFDAANTAAERRTFRTSRRRIQRRRQRIRLLQELFAEEMVKLDPGFFQRLSDSAFWQEDKQEQQIYSLFTCENYTDVDYYREYPTIYHLRSALIQEKKEFDLRLLYLALHHLMKHRGHFLFNGSINNVTSFHTTFQTFADCLYDEFDIELECDSEDRFAEILKDKHARKTGKCSELEIICHIEKSNKQLKELFKLITGMKASLSVVFGDDELAEIEHNKISFSESSYDEVRLALEDEIQERTGILDIFHAVYSWAILADILEGGEYEGNSYLSVAKVSTYKKHGDDLRLLRTLVREYCPDHYKSFFSVSGKENYCAYAGTLKKNGKKQPIKRCSQEDFYKALKKLLNQMPTEQPEVKDIFIEIENGTFLPLQVSKDNGVIPYQVNKMELEKILQNAEEYLPFLKNIDEECGKTVSKKIIDLFEFRIPYYVGPLNTAKGENCWMVRKEAGRIYPWNFDEKVDRDQSAEKFIRRMTNQCTYLIHEDVVPKNSLLYSEFMVLNELNNVKIRSEKLPVELKQAIVLDLFKKQKQITGKKLLNYLNANGYDVKKEDLSGFDGNFKSSLSSYLTLKKVFGEELDKYSVQQMAEDIILWITLYGDDQKMLRRVIRKHYEQQLSEEQILSLSKLKFQGWGRLSRRLLSEMEGVDCETGECMTVMQGLRNTQNNLMQLLSQQFSFMELIEEENGNYYVDEITYDNLVKDMVISPSVKRAVWQTVQIVEEIKGVMGCQPKKIFVEMARSDEEKKRTVSRKDRLLEAYDAIKDEARQWQEELQKYSDGDFKAIKLYLYYTQMGQCMYTGRKIDLSQLNDATVWDRDHIYPQSKTKDDSLDNLVLVDRSVNAKKSDGMLSPEIQQRMRATWKYLKEKKLISEKKYERLTRVSPLTDEELAGFINRQLVETRQSSKAVATLLKRVYDEAEIVYVKAEAVSNFRRDNLDYIKVRDLNDYHHAKDAYQNIVVGNVFHEKFTSNPLRWLKNNPNTKYSLNQMFNFDLEKNGVVIWKRGKAGSIKCVEETLKRNDILFTRYAFCNKGGFFNQMLTAAPEDKTKAKGLVPIKKGMETWKYGGYTSVTPSHFMLVASKDKKGKEIRTIETVPLYRWKEFKENPDALLQYCREFYGLKEPKVLIPCIKKNARLVVNGFPMHLKGSTGKQLILQGAVQLCLNNENIKYLKKVTKYLEYNAQRRDKRTLLEVREVTGINKEENIQLYDVFVDKLSNTIYQYRPANPKDNLIKGREKFIELGLAEQCVVLGEVLHLFQCKPLTSDLTLIGGSPNTGTIKITKTISNCNVVKLLSQSIAGVKVREINLLII

SEQ ID NO: 37428 - DNA, 4047 bp, synthetic construct
  source 1..4047: mol_type = other DNA
atgagcataaaaagtgattattttttaggacttgatattggtacggattctattggatgggcggtaaccgacccagaatatcacatattgagacgaaaaggtaaagcattatggggaataagattatttgatgcggccaatacagcggcagaacggcgaacatttaggacaagccgaagaaggattcagagaagacgacagagaattcggttattgcaagaattatttgcagaagaaatggtaaaattagacccaggattttttcagaggttgtcagacagcgcattttggcaggaggataagcaagagcagcaaatttattcactttttacttgtgaaaattatacagatgttgattattacagagaatatcctactatttatcatttgagaagtgcattgattcaggaaaagaaggaatttgatcttcgtcttctatatcttgctcttcaccatttgatgaagcacaggggacatttcctgtttaatgggagtattaataatgtgacgtcatttcatacgacgtttcagacgtttgcagattgtctttatgatgagtttgatatagaactggaatgtgattccgaagatagatttgcagaaattttaaaggataaacatgccagaaaaacaggaaaatgttctgaattagagataatctgtcatatagaaaaatcaaataagcagctaaaagaactttttaaattaattacaggaatgaaagctagtttgagtgttgtgtttggtgatgatgagttagcggaaatagaacataataagattagtttttcagagagtagttatgatgaagtacgtcttgcattggaggatgagattcaggagaggactggtatactggatatctttcatgcagtttatagttgggcgattctcgcggatattttagaaggcggagaatatgaggggaattcttatctaagcgttgcgaaggtaagcacttataaaaagcatggtgatgatttgcggttgctaagaacactggttcgggaatattgtcctgatcattacaaatctttcttttccgtatcagggaaggagaattattgtgcatatgcgggtactttaaaaaagaatggaaaaaaacagccgattaaacgttgcagccaggaagatttttataaagcgttaaagaaattgctgaatcagatgccgacagaacaaccagaagtgaaagacatcttcatcgaaattgaaaatggtacttttttgccgttgcaggtaagtaaggataatggagtgataccttatcaggtaaataagatggaattagaaaaaatcctgcagaatgcagaggaatatttgccatttctaaaaaatatagatgaagaatgtggaaaaacggttagtaagaagattatagatctctttgagtttagaataccatattatgtagggccgcttaataccgctaaaggagaaaactgttggatggtcagaaaagaagcggggagaatatatccgtggaattttgatgaaaaggtagacagagatcaatcagcagaaaaatttatccgtagaatgacgaatcagtgtacatatttaatacatgaggatgttgtacctaaaaattctttgctttattcggagtttatggtgcttaatgaattaaataatgtaaagatccggtctgagaagctgccggtggagttaaaacaggcaatagtattggatttgtttaagaaacaaaagcagataacaggaaaaaaacttcttaattacttgaatgcaaatggatatgatgtaaaaaaagaagatttgtcagggtttgacggaaactttaaatcatctctgtcatcatatcttactttgaaaaaagtatttggtgaagaattagataaatatagtgtgcagcagatggcagaggatattatcttgtggatcactctgtatggagatgatcagaagatgttgcgcagggtaattcgaaaacattatgaacagcaattgagtgaagaacagattctttccttatcgaaattgaaattccaaggctggggaagattatccagacgacttttgagtgaaatggaaggcgttgattgtgagactggtgagtgtatgacggtcatgcaaggacttcgtaatactcagaataatctgatgcagcttctaagtcagcagttttcatttatggaattgattgaggaagaaaatgggaattattatgtagatgagattacatacgataatcttgtgaaagatatggttatatctccgtcagtgaagagagcagtctggcagacagttcagattgtggaggagattaagggggtaatgggctgtcagcctaagaagatatttgtcgagatggcgcgaagcgatgaagagaaaaagcgtactgtatctaggaaagacaggttattagaagcatatgatgcgatcaaggatgaggctcgtcaatggcaggaagagttgcaaaagtattcagatggtgattttaaggctattaaactttatctgtattatacgcagatggggcaatgtatgtatactggaagaaagatagatctgtcacaattaaatgatgcgacggtatgggacagagatcatatatatccacagtccaaaacaaaagatgatagtctggataatctggtattggtagaccggagcgtgaacgctaagaaaagtgatgggatgctatcacctgagattcagcagagaatgcgggctacttggaaatacttaaaagagaaaaagttgatttcagagaagaaatatgagcgtttgactagggtctcaccacttacagatgaggaattggcaggttttattaatcgacagttagttgaaacacgtcagtcttcgaaagcagtagcaacacttttgaaacgagtatatgatgaagcggagattgtctatgtaaaagcggaagctgtttcaaattttagaagagataatttggattatattaaggtgcgtgatctgaatgattatcatcatgctaaagatgcatatcagaatattgtagtggggaatgtttttcatgagaaatttaccagcaatccgcttcgttggctgaaaaacaatcctaatacgaaatatagtttaaatcagatgtttaactttgatttagagaaaaatggggtggtaatatggaaaagggggaaggctggaagtattaaatgtgttgaagaaacattgaaaagaaatgatattctttttacacgatatgctttttgtaataaaggtggtttttttaaccagatgttaacggcagctccagaagataaaacgaaagcaaagggacttgtaccaataaaaaaaggtatggaaacatggaaatacgggggatatacatcagtaactccgtcacattttatgttggttgcttcgaaagataagaaaggaaaggagataagaacgattgagacagttccgttgtataggtggaaagagttcaaagaaaatccagatgcattactccaatattgtagagagttctatggtttgaaagagcccaaggtgttgataccatgcatcaagaagaatgccagattagtcgttaatggatttccaatgcatttgaaagggagtacaggaaaacaattgattttgcagggagcggttcaattatgtctgaataatgaaaatataaagtatttgaaaaaagtcacaaaatatttggaatataatgcacagagaagagataaaagaacactgctggaagtaagagaggttacaggaattaacaaagaggaaaatatacagttatatgatgtgtttgttgataaattgagtaacacaatatatcagtatcgtccggccaatccaaaggacaatcttataaaaggaagagagaagtttatagaattagggttggcagaacaatgtgttgtgttaggtgaagtattgcatttgttccaatgtaaaccactcacgtctgatttgactttgattggaggttcaccgaatacagggacaataaaaataacaaagacaattagtaattgtaatgttgtaaagttgttaagccaatctattgcaggtgttaaagtgagagaaattaatttgttaataatatga

SEQ ID NO: 37429 - DNA, 4044 bp, synthetic construct
  source 1..4044: mol_type = other DNA
tctatcaagagcgactacttcctgggcctcgacatcggcacagattctatcggatgggccgtgacagaccccgagtaccacatcctgagaagaaagggcaaagccctgtggggcatcagactgttcgatgccgccaatactgccgccgagagaagaaccttccggaccagcagaagaagaatccagcggcggagacagcggatcagactgctgcaagagctgttcgccgaggaaatggttaagctggaccccggcttcttccagagactgagcgatagcgccttctggcaagaggacaagcaagagcagcagatctacagcctgtttacctgcgagaactacaccgacgtggactactacagagagtaccccaccatctaccacctgagaagcgccctgatccaagagaaaaaagagttcgacctgcggctgctgtatctggccctgcaccatctgatgaagcaccggggccactttctgttcaacggcagcatcaacaacgtgaccagcttccacaccaccttccagaccttcgccgactgcctgtacgacgagttcgacatcgagctggaatgcgacagcgaggacagattcgccgagatcctgaaggataagcacgccagaaagaccggcaagtgctctgagctggaaatcatctgccacatcgagaagtccaacaagcagctgaaagaactgttcaagctgatcaccggcatgaaggccagcctgagcgtggtgtttggagatgatgagctggccgagatcgagcacaacaagatcagcttcagcgagagcagctacgacgaagtgcggctggccctggaagatgagattcaagagagaaccggcatcctggacatcttccacgccgtgtattcttgggccatcctggccgatattctggaaggcggcgagtacgagggcaacagctatctgtctgtggccaaggtgtccacctacaagaagcacggcgacgacctgagactgctgagaacactcgtgcgcgagtactgccccgaccactacaagagctttttcagcgtgtccggcaaagagaactactgcgcctacgccggcacactgaagaagaacggcaagaagcagcccatcaagcggtgcagccaagaggacttctacaaggccctgaagaaactgctgaaccagatgcctaccgagcagcccgaagtgaaggatatcttcatcgagattgagaacggcaccttcctgcctctgcaagtgtccaaggacaacggcgtgatcccctaccaagtgaacaagatggaactcgagaagatcctgcagaacgccgaagagtacctgcctttcctgaagaacatcgacgaggaatgcggcaagaccgtgtccaagaagatcatcgacctgttcgagttcagaatcccctactacgtgggccctctgaataccgccaagggcgagaattgctggatggttcgaaaagaggccggcagaatctacccctggaacttcgatgagaaggtggacagagatcagagcgccgagaagttcatcagacggatgaccaaccagtgcacctacctgatccacgaggacgtggtgcctaagaacagcctgctgtactccgagttcatggtgctgaacgagctgaacaatgtgaagattcggagcgagaagctgcccgtggaactgaagcaggccatcgtgctggacctgtttaagaagcagaagcagatcacagggaagaagctgctcaactacctgaacgccaacggctacgacgtgaagaaagaggacctgagcggcttcgacggcaacttcaagtccagcctgtccagctacctgactctgaagaaggtgttcggagaggaactggacaagtacagcgtgcagcagatggccgaggacatcatcctgtggatcaccctgtatggcgacgatcagaaaatgctgcggagagtgatccggaagcactacgagcagcagctgtctgaggaacagatcctgagcctgagcaagctgaagttccaaggctggggcagactgtctagacggctgctctctgaaatggaaggcgtggactgtgaaaccggcgagtgcatgacagtgatgcagggcctgagaaacacccagaacaacctgatgcagctgctgagccagcagttcagcttcatggaactgatcgaggaagagaacgggaactactacgtcgacgagatcacctacgacaacctggtcaaggacatggtcatcagccctagcgtgaaaagggccgtgtggcagacagtgcagatcgtggaagaaatcaagggcgtgatgggatgccagcctaagaaaatcttcgtggaaatggcccgcagcgacgaagagaagaaacggaccgtgtctcggaaggatcggctgctggaagcctacgacgccatcaaggatgaggcccggcaatggcaagaagaactgcagaaatactccgacggcgatttcaaggccatcaagctgtacctgtactacacccagatgggccagtgcatgtacaccggcagaaaaatcgatctgtcccagctgaacgacgccaccgtgtgggatagagatcacatctaccctcagagcaagaccaaggacgacagcctggacaatctggtgctggtggatagatccgtgaatgccaagaaaagcgacggcatgctgagccccgagatccagcagagaatgagagccacctggaagtacctgaaagaaaagaagctcatcagcgagaagaagtacgagcggctgaccagagtgtcccctctgacagatgaagaactggccggcttcatcaaccggcagctggtggaaacaagacagagcagcaaagccgtggccacactgctgaagagggtgtacgatgaggccgagattgtgtatgtgaaggccgaggccgtgtctaacttccggcgggataacctggactacatcaaagtgcgggacctgaacgactaccaccacgccaaggacgcctaccagaacatcgtcgtgggcaacgtgttccacgagaagtttaccagcaatcccctgcggtggctgaaaaacaaccccaacaccaagtactccctcaaccagatgttcaacttcgacctggaaaagaacggcgtggtcatctggaagagaggcaaggccggctccattaagtgtgtggaagagacactgaagcggaacgacatcctgttcaccagatacgctttctgcaacaaaggcggcttctttaatcagatgctgaccgccgctccagaggataagacaaaggccaaaggcctggtgcctatcaagaaaggcatggaaacctggaaatacggcggctacaccagcgtgacccctagccactttatgctggtggccagcaaggacaagaagggaaaagagatccggaccatcgagacagtgcccctgtaccggtggaaagagttcaaagagaatcccgacgctctgctccagtactgcagagagttctacggcctgaaagagcccaaggttctgatcccttgcatcaagaagaatgcccggctggtcgtgaacggcttccctatgcacctgaagggcagcaccggaaaacagctgattctgcagggtgccgtgcagctgtgcctgaacaacgagaacatcaagtacctcaagaaagtgacgaagtacctcgagtacaacgcccagcggagagacaagagaaccctgctcgaagttcgggaagtgaccggaatcaacaaagaggaaaacatccagctgtacgatgtgttcgtggacaagctgagcaacacaatctaccagtacagacccgccaatcctaaggacaacctcatcaagggccgcgagaaattcatcgagcttggcctggctgagcagtgcgtggtgctgggagaagtgctgcatctgttccagtgcaagcccctgaccagcgatctgacactgatcggcggaagccctaacaccggcaccatcaagatcaccaagaccatcagcaactgcaacgtggtcaagctgctgtcccagtctatcgccggcgtgaaagtccgcgagatcaacctgctgatcatctga

SEQ ID NO: 37430 - RNA, 107 nt, synthetic construct
  source 1..107: mol_type = other RNA
gtttgagagtagtgtaagaaattacactacaagttcaaataaaaatttattcaaatccatttgctacattgtgtagaatttaaagatctggcaacagatcttttttt
